(19) United States
(12) Patent Application Publication
(10) Pub. No.: US 2019/0259469 A1
(43) Pub. Date: Aug. 22, 2019

(54) Method for Evaluating Genotoxicity of Substance

(71) Applicant: Kao Corporation, Tokyo (JP)

(72) Inventors: Shoji Matsumura, Saitama-shi (JP); Hiroshi Honda, Utsunomiya-shi (JP)

(73) Assignee: Kao Corporation, Tokyo (JP)

(21) Appl. No.: 16/269,980

(22) Filed: Feb. 7, 2019

Related U.S. Application Data
(63) Continuation of application No. PCT/JP2017/005700, filed on Feb. 16, 2017.

(51) Int. Cl. G16B 20/50; C12Q 1/6886; G16B 20/20

(52) U.S. Cl. CPC G16B 20/50; C12Q 1/6886; C12Q 2600/166; C12Q 2600/156; G16B 20/20

(57) ABSTRACT

It is intended to provide a method for conveniently analyzing mutations in cells at low cost. The present invention provides a method for analyzing mutations in a cell population, comprising: obtaining DNAs derived from the cell population; sequencing fragments of the DNAs to obtain one or more read sequences per fragment; comparing each of the one or more read sequences with a reference sequence to detect sites of mismatch bases between the each read sequence and the reference sequence; obtaining the sites thus detected in the one or more read sequences as sites of mutation; and obtaining information on mutations at the sites of mutation and analyzing the tendencies of the mutations on the basis of the information.

### REFERENCE TO SEQUENCE LISTING SUBMITTED ELECTRONICALLY

[0001] The content of the electronically submitted substitute sequence listing, file name 2537_1690001_SL_ST25.txt, size 6,316,495 bytes; and date of creation Feb. 7, 2019, filed herewith, is incorporated herein by reference in its entirety.

### FIELD OF THE INVENTION

[0002] The present invention relates to a method for analyzing mutations or evaluating the genotoxicity of a substance.

### BACKGROUND OF THE INVENTION

[0003] Genotoxicity is a generic term for toxicities to intracellular genetic materials which is mainly DNA and refers to, in a narrower sense, the property of causing damage, mutation and others in DNA to alter its genetic information (mutagenicity). The genetic information in DNA is retained by a nucleotide sequence constituted by 4 bases of A (adenine), T (thymine), G (guanine) and C (cytosine). A genotoxic substance acts directly or indirectly on DNA and causes qualitative or quantitative change in its nucleotide sequence to alter its genetic information. Such alteration in genetic information by a genotoxic substance is known to cause carcinogenesis or reproductive and developmental toxicity. Thus, the evaluation of medicines, cosmetics, various chemical substances, etc. for their genotoxicity is important for public safety.

[0004] Diverse mechanisms underlie the genotoxicity and they are broadly divided into: a base pair substitution mutation which alters base pair information in DNA to a different base pair; a short insertion or deletion mutation which causes the insertion or deletion of a short nucleotide sequence in the sequence of DNA; and a genomic structural variation which changes a genomic structure by causing the insertion, deletion, translocation, inversion or the like of a relatively long nucleotide sequence in the whole genomic sequence. In particular, the short insertion or deletion mutation is also called frameshift mutation when this mutation changes the reading frame of a protein encoded by a gene. Reportedly, the genotoxicity of a chemical substance often causes a base pair substitution mutation or a short insertion or deletion mutation.

[0005] Various genotoxicity tests using in vitro or in vivo models have been developed so far as methods for evaluating the genotoxicity of a substance. For example, a test of detecting the base pair substitution mutation, or the frameshift mutation mentioned above includes an Ames test developed by Professor Bruce N. Ames (Non Patent Literature 1). The Ames test employs Salmonella strains which have a mutation in histidine biosynthetic gene and cannot survive in a medium free from histidine. When the Salmonella strains are exposed to a substance and thereby become capable of synthesizing histidine through a mutation in the gene, these strains become able to form colonies on the medium free from histidine. The mutagenicity of the substance is confirmed by counting the number of colonies formed. In addition, for example, a micronucleus test using mammalian cells is used as a test for detecting the presence or absence of a genomic structural variation (Non Patent Literature 2). Furthermore, the presence or absence of the genotoxicity of a substance can be confirmed highly sensitively by combining a plurality of genotoxicity tests.

[0006] However, the detection of genotoxicity in the conventional genotoxicity tests as mentioned above depends on an indirect indicator which does not directly reflect the quantity or quality of a mutation. Therefore, the conventional tests cannot gain detailed qualitative and quantitative mutation information such as the type of the mutation or one in every how many bases the mutation occurs. Since there is no unified indicator among various tests, it is difficult to compare results among different tests. Thus, the conventional genotoxicity tests do not provide sufficient information for pursuing the systemic understanding of genotoxicity, such as the comparison of strength among a plurality of mutagens or the classification of genotoxicity according to mechanisms.

[0007] The application of high-throughput sequencing technology using a next-generation sequencer or the like to genotoxicity evaluation has been proposed. Maslov et al. (Non Patent Literature 3) disclose a methodology for the application of high-throughput sequencing to genotoxicity evaluation. One of the methods involves exposing cells to a substance, then preparing a population with uniform genomic information derived from a single cell, and obtaining the genomic information using a next-generation sequencer to identify a mutation site. As practical use of this methodology, for example, Matsuda et al. (Non Patent Literature 4) have reported that individual mutations and their positions were identified by isolating a single colony of a Salmonella typhimurium-derived TA100 strain exposed to a mutagen, obtaining the whole genomic sequence thereof using a next-generation sequencer, and comparing read sequences with a reference sequence to detect, as a mutation site, a site having a base change commonly occurs among a plurality of read sequences with a given frequency. Matsuda et al. (Non Patent Literature 5) have further reported a method which involves harvesting a trace amount of a diluted strain culture solution instead of isolating a single colony, additionally culturing the strain, and detecting mutations by the same approach as in Non Patent Literature 4 using the resulting cultures. A method for evaluating the accumulation of DNA mutations by radiation or the like using a next-generation sequencer has been reported as another method.

[0008] Specifically, a sequence specific for a restriction site or the like (tag sequence) is focused on, and evaluation is conducted on the basis of the frequency in appearance of the sequence to predict a mutation frequency in the genome (Patent Literature 1). A method for detecting mutations is also disclosed which involves adding a unique tag sequence to each molecule of cell-free (cf) DNA, obtaining consensus sequences of a plurality of read sequences from the same molecule, then aligning the plurality of read sequences at the same location on the genome and comparing them (Non Patent Literatures 6 and 7).
[0009] (Patent Literature 1) WO 2014/175427
[0010] (Non Patent Literature 1) Mortelmans et al., Mutation Research, 2000, 455: 29-60
[0011] (Non Patent Literature 2) Matsushima et al., Mutagenesis, 1999, 14: 569-580
[0012] (Non Patent Literature 3) Maslov et al., Mutation Research 2015, 776: 136-143
[0013] (Non Patent Literature 4) Matsuda, Genes and Environment, 2013, 35: 53-56
[0014] (Non Patent Literature 5) Matsuda et al., Genes and Environment, 2015, 37: 15-24
[0015] (Non Patent Literature 6) Nucleic Acids Research, 2016, 44 (11): e105
[0016] (Non Patent Literature 7) Clinical Oncology, 2016, 28: 735-738

### SUMMARY OF THE INVENTION

[0017] In one embodiment, the present invention provides a method for evaluating the genotoxicity of a test substance, comprising:

(1) obtaining DNAs from a test group, the test group is a cell population exposed to the test substance;
(2) sequencing fragments of the DNAs to obtain one or more read sequences per fragment;
(3) comparing each of the one or more read sequences with a reference sequence to detect sites of mismatch bases between the each read sequence and the reference sequence, wherein the reference sequence is a known sequence in the DNAs;
(4) obtaining the sites detected in the step (3) as sites of mutation each having a base pair substitution mutation;
(5) classifying each of the obtained mutations according to base pair mutation patterns; and
(6) determining respective mutation frequencies of the mutation patterns obtained in the step (5).

[0018] In an alternative embodiment, the present invention provides a method for evaluating the genotoxicity of a test substance, comprising:

(1′) obtaining DNAs from a test group, the test group is a cell population exposed to the test substance;
(2′) sequencing fragments of the DNAs to obtain one or more read sequences per fragment;
(3′) comparing each of the one or more read sequences with a reference sequence to detect sites of mismatch bases between the each read sequence and the reference sequence, wherein the reference sequence is a known sequence in the DNAs;
(4′) obtaining the sites detected in the step (3′) as sites of mutation each having a base pair substitution mutation;
(5′) as to each of the mutations thus obtained, determining a context sequence comprising a base before mutation and adjacent upstream and downstream bases of the base before mutation, the context sequence is determined on the basis of the reference sequence;
(6′) typing each of the mutations obtained in the step (4′) according to the context sequence determined in the step (5′) and the type of the base after mutation; and
(7′) determining respective mutation frequencies of the mutation types obtained in the step (6′).

[0019] In a further alternative embodiment, the present invention provides a method for evaluating the genotoxicity of a test substance, comprising:

(1″) obtaining DNAs from a test group, the test group is a cell population exposed to the test substance;
(2″) sequencing fragments of the DNAs to obtain one or more read sequences per fragment;
(3″) comparing each of the one or more read sequences with a reference sequence to detect sites of base insertion or deletion in the each read sequence with respect to the reference sequence, wherein the reference sequence is a known sequence in the DNAs;
(4″) obtaining the sites detected in the step (3″) as sites of mutation each having an insertion or deletion mutation;
(5″) as to each of the mutations thus obtained, determining the base length of the insertion or deletion and/or the type of the inserted base; and
(6″) determining respective mutation frequencies for each of the sites of the insertion or deletion mutations with different base lengths of the insertion or deletion and/or different types of the inserted bases determined in the step (5″).

[0020] In a further alternative embodiment, the present invention provides a method for evaluating mutations in cancer cells, comprising:

(1) obtaining DNAs from a test group, the test group is a cancer cell population;
(2) sequencing fragments of the DNAs to obtain one or more read sequences per fragment;
(3) comparing each of the one or more read sequences with a reference sequence to detect sites of mismatch bases between the each read sequence and the reference sequence, wherein the reference sequence is a known sequence in the DNAs;
(4) obtaining the sites detected in the step (3) as sites of mutation each having a base pair substitution mutation;
(5) classifying each of the obtained mutations according to base pair mutation patterns; and
(6) determining respective mutation frequencies of the mutation patterns obtained in the step (5).

[0021] In a further alternative embodiment, the present invention provides a method for evaluating genetic information in cultured cells, comprising:

(1) obtaining DNAs from a test group, the test group is a cultured cell population;
(2) sequencing fragments of the DNAs to obtain one or more read sequences per fragment;
(3) comparing each of the one or more read sequences with a reference sequence to detect sites of mismatch bases between the each read sequence and the reference sequence, wherein the reference sequence is a known sequence in the DNAs;
(4) obtaining the sites detected in the step (3) as sites of mutation each having a base pair substitution mutation;
(5) classifying each of the obtained mutations according to base pair mutation patterns; and
(6) determining respective mutation frequencies of the mutation patterns obtained in the step (5).

### BRIEF DESCRIPTION OF THE DRAWINGS

[0022] FIG. 1A and FIG. 1B show the mutation call ratios of base pair mutation patterns in synthetic DNA samples. FIG. 1A: GC base pair mutation patterns, FIG. 1B: AT base pair mutation patterns.

[0023] FIG. 2A and FIG. 2B show the increased mutation frequencies of base pair mutation patterns in synthetic DNA samples. FIG. 2A: GC base pairs, FIG. 2B: AT base pairs.

[0024] FIG. 3A and FIG. 3B show the increased mutation frequencies of insertion mutations in synthetic DNA samples. FIG. 3A: the numbers of inserted bases, FIG. 3B: the types of inserted bases.

[0025] FIG. 4A and FIG. 4B show the increased mutation frequencies of base pair mutation patterns in samples exposed to a mutagen. FIG. 4A: GC base pairs, FIG. 4B: AT base pairs. *: p<0.05, **: p<0.01, ***: p<0.001 (Dunnett's test).

[0026] FIG. 5 shows the difference, depending on the types of original bases, in the increased mutation frequencies of base pair mutation patterns in samples exposed to a mutagen.

[0027] FIG. 6 shows spectral analysis results of base pair mutation patterns in samples exposed to a mutagen.

[0028] FIG. 7 shows sequence context analysis results of base pair mutations in samples exposed to a mutagen. Signature 11: patterns of mutation signatures obtained using a known alkylating agent, ENU: mutation patterns obtained by ethylnitrosourea treatment in Example 2.

[0029] FIG. 8 shows sequence context analysis results of base pair mutations in samples exposed to a mutagen (continued from FIG. 7). Signature 11: patterns of mutation signatures obtained using a known alkylating agent, ENU: mutation patterns obtained by ethylnitrosourea treatment in Example 2.

[0030] FIG. 9, “Schematic diagram 1,” shows a schematic diagram of the procedures for preparing the DNA sample.

[0031] FIG. 10A-10D, “Schematic diagram 2,” shows a schematic diagram of the four steps in the editing and analysis flows of the read sequence. FIG. 10A shows step 1: the merging of pair reads. FIG. 10B shows step 2: mapping onto the reference sequence. FIG. 10C shows step 3: the restriction to the marged regions of reads on the basis of quality values. FIG. 10D shows step 4: the direct extraction of the mutation site from the read.

[0032] FIG. 11, “Schematic diagram 3,” shows a schematic diagram of the mutation analysis algorithm for base pair substitution.

### DETAILED DESCRIPTION OF THE INVENTION

### 1. Definition

[0033] In the present specification, the term “mutation” refers to a mutation in DNA. Examples thereof include the deletion, insertion, substitution, addition, inversion, and translocation of a base or a sequence in DNA. In the present specification, the mutation encompasses the deletion, insertion, substitution, and addition of one base, and the deletion, insertion, substitution, addition, inversion, and translocation of a sequence consisting of two or more bases. In the present specification, the mutation also includes mutations in a coding region and a noncoding region and also includes a mutation which changes an expressed amino acid and a mutation which does not change an expressed amino acid (silent mutation).

[0034] In the present invention, the “genotoxicity” of a substance to be evaluated refers to the property of causing a mutation by the substance (so-called mutagenicity).

[0035] In the present specification, the term “original fragment” is a fragment of DNA to be analyzed and refers to a single-stranded DNA fragment whose sequence is to be read through sequencing reaction. In the present specification, the term “original base” as to a base at a mutation site refers to a base before the mutation at a location of the mutation in the original fragment.

[0036] All patent literatures, non patent literatures, and other publications cited herein are incorporated herein by reference in their entirety.

### 2. Method for Analyzing Mutation in Cell Population

[0037] A method for evaluating genotoxicity by use of high-throughput sequencing is expected to be able to directly evaluate the quantity or quality of a mutation caused by a mutagen. Also, such a method is considered basically applicable to every organism species as long as a genomic sequence thereof is available. Meanwhile, a conventional method for evaluating genotoxicity by use of high-throughput sequencing, as disclosed in Non Patent Literature 4, adopts a method of aligning and comparing all of a large number of read sequences including a site of interest, in order to detect a base mutation at one site. Such a method therefore requires a great deal of sequence information and requires enormous time, labor and cost for the obtainment of the sequence information and the detection of the mutation site. Furthermore, a mutation induced by exposure to a substance generally has a very low frequency and does not evenly occur among individual cells within a population. Therefore, it is considered difficult to accurately evaluate a mutation frequency within a cell population or the influence of a mutagen on the cell population by the analysis of single cells as disclosed in Non Patent Literature 4. In the method described in Non Patent Literature 5, genetic information in samples subjected to analysis was still uniform. Therefore, the results did not reflect information in the cell population. For the evaluation of genotoxicity, important points are how to detect low-frequency mutations contained in individual cells and how to evaluate the genotoxicity to the population on the basis of the detection results.

[0038] If the analysis as disclosed in Non Patent Literature 4 or 5 is repetitively conducted for samples derived from a plurality of different single cells, information which reflects events in the cell population can be gained. However, time, labor and cost required therefor are enormous. This method is not realistic, particularly, for evaluating a plurality of substances or for evaluating a dose-response relationship. On the other hand, the method of Patent Literature 1, albeit with relatively low cost, merely predicts a mutation frequency through the use of a specific sequence such as a restriction site. This method has low qualitative and quantitative performance for mutations in the whole genome and is not capable of achieving genotoxicity evaluation based on accurate mutation information.

[0039] The conventional methods for evaluating genotoxicity by use of high-throughput sequencing are very difficult to apply to the evaluation of a plurality of substances, in consideration of technical hurdles for the isolation and culture of mammalian cells or increased mutation analysis cost attributed to genome size. There is a demand for the development of a convenient and low-cost method for detecting quantitative and qualitative information on mutations caused by a mutagen in a cell population retaining various pieces of mutation information.

[0040] The present inventors have found an analysis method which involves comparing each of read sequences with a reference sequence to detect a base mutation in each individual read sequence, and calculating the pattern and frequency of the mutation by the analysis of the results, instead of the conventional methods which involve comparing a plurality of read sequences containing a specific site of a reference sequence and thereby detecting, as a mutation site, a site where a nucleotide sequence at the specific site is altered with a given frequency in the plurality of read sequences. This analysis method may permit mutation detection based on a great deal of nucleotide sequence information, or high-throughput and highly sensitive mutation detection more efficiently than the conventional methods, and provide data which reflects the quantitative and qualitative tendencies of mutations as the whole cell population.

[0041] The method of the present invention is capable of obtaining quantitative and qualitative information on mutations within a cell population by single analysis. Thus, the method of the present invention permits mutation analysis at a cell population level much more conveniently and at much lower cost as compared with the conventional methods. The method of the present invention is particularly effective for analysis to determine tendencies of mutations in a cell population having heterogeneous genetic information, such as the genotoxicity evaluation of substances or the evaluation of cancer.

[0042] Thus, in one embodiment, the present invention provides a method for analyzing mutations in a cell population. The method of the present invention has the following basic procedures of:

(A) obtaining DNAs derived from the cell population;
(B) sequencing fragments of the DNAs (i.e., original fragments) to obtain one or more read sequences per fragment;
(C) comparing each of the one or more read sequences with a reference sequence to detect sites of mismatch bases between the each read sequence and the reference sequence;
(D) obtaining the sites thus detected in the one or more read sequences as mutation sites; and
(E) obtaining information on the mutations at the mutation sites and analyzing the tendencies of the mutations on the basis of the information.

[0043] The cell population used in the method of the present invention may be a homogeneous population (e.g., a cell population derived from a single colony, which has uniform genetic information), may be a heterogeneous population (population having non-uniform genetic information), or may be a population having unknown uniformity of genetic information. A heterogeneous population or a putative heterogeneous cell population is preferred. Examples of the cell population used in the method of the present invention include specimens harvested from animals or plants, and populations of animal-, plant- or microbe-derived cultured cells and preferably include populations of animal, plant or microbe strain-derived cultured cells. Examples of the animal preferably include mammals such as humans, silkworms, and nematodes. Examples of the microbes preferably include E. coli, Salmonella, and yeasts. Other examples of the cell population used in the method of the present invention include specimens harvested from living bodies and cultures thereof, cultured cells exposed to a mutagen or a candidate substance thereof, and cultured cells given a drug or a candidate substance thereof.

[0044] The cell population-derived DNAs used in the present invention can be obtained by extraction or isolation from the cell population by use of a usual method in the art. In the extraction or isolation, for example, a commercially available DNA extraction kit can be used. Alternatively, the cell population-derived DNAs preserved after the extraction or isolation may be obtained and used in the method of the present invention. Examples of the cell population-derived DNA used in the present invention include genomic DNA, mitochondrial genomic DNA, chloroplastic genomic DNA, plasmid DNA, and viral genomic DNA. Among them, genomic DNA is preferred.

[0045] Alternatively, in the case of analyzing RNA virus in the cell population, RNAs may be obtained and analyzed instead of the DNAs. The RNAs in cells can be extracted or isolated by a usual method in the art using a commercially available RNA extraction kit or the like. Alternatively, the cell population-derived RNAs preserved after the extraction or isolation may be obtained and used in the method of the present invention. In the case of obtaining and analyzing RNA in the method of the present invention, the “DNA” in the present specification is replaced with “RNA”, and the base T is replaced with the base U.

[0046] The reference sequence used in the method of the present invention is a known sequence contained in the DNAs which are subject to the mutation analysis. In this context, it is preferred to use a sequence registered in a public database or the like as the known sequence. Otherwise the known sequence that may be used is a sequence in the DNAs to be analyzed, sequenced in advance using a sequencer or the like prior to the step (C) in the method of the present invention. The reference sequence is not particularly limited by its region, length or the number thereof and can be appropriately selected from the DNAs according to the purpose of the mutation analysis. When the purpose of the mutation analysis according to the present invention is, for example, the genotoxicity evaluation of a substance, the length of the reference sequence is not particularly limited and is preferably 1,000 bp or more, more preferably 10,000 bp or more, even more preferably 100,000 bp or more, even more preferably 1,000,000 bp or more, in total.

[0047] The fragmentation of the DNAs can be conducted by use of a usual method in the art, such as ultrasonic treatment or enzymatic treatment. The length of each fragment to be prepared can be appropriately selected according to a length which can be accurately read by a sequencer. In general, 100 to 10,000 bp can be selected. However, a fragment having a length of 10,000 bp or more may be prepared as long as the length can be accurately read by a sequencer. A more appropriate range of the length can be selected depending on the type of the sequencer. For example, in the case of using a sequencer for sequencing reaction which includes a fragment amplification step, the length of the fragment is preferably 100 to 500 bp on average, more preferably 150 to 200 bp on average. For example, in the case of using a sequencer conducting single-molecule real-time sequencing, the length of the fragment is preferably 150 to 10,000 bp on average, more preferably 200 to 1,000 bp on average, even more preferably 200 to 500 bp on average.

[0048] Subsequently, the obtained fragments are sequenced. The sequencing of moieties to be used in sequence comparison with the reference sequence mentioned later suffices for the sequencing of the fragments. For example, fragments having a sequence in which at least a portion, preferably the whole corresponds to the DNA region of the reference sequence, can be sequenced. For mammalian cells or the like, exon regions or the like may be selectively sequenced. A kit for region selection such as SureSelect (manufactured by Agilent Technologies, Inc.) is available on the market.

[0049] In the sequencing reaction which includes a fragment amplification step, the fragments are amplified by PCR or the like while each amplified fragment is sequenced. In the single-molecule real-time sequencing reaction, the fragments are sequenced without amplification. In the sequencing of the fragments, a sequencer known in the art can be used. Preferably, a high-throughput sequencer (so-called next-generation sequencer) is used. HiSeq (manufactured by Illumina, Inc.), MiSeq (manufactured by Illumina, Inc.), or the like is available on the market as the high-throughput sequencer which conducts the fragment amplification. Also, Pac Bio RS II (manufactured by Pacific Biosciences of California, Inc.), Pac Bio Sequel System (manufactured by Pacific Biosciences of California, Inc.), or the like is available on the market as the high-throughput sequencer which conducts single-molecule real-time sequencing.

[0050] Detailed procedures for the method for sequencing the fragments are not particularly limited. A sequencing method with higher accuracy is preferred. One example of such a method for sequencing including a fragment amplification step includes a method of obtaining sequences from both ends of each fragment and exploiting a common moiety, as mentioned later. Comparison accuracy may be further improved by comparing complementary strands of sequences obtained from two original fragments complementary to each other. Examples of such a technique include a method of adding adaptors unique to each fragment molecule during HiSeq or MiSeq library preparation and referring to the nucleotide sequences of complementary strands on the basis of the adaptor sequence information after sequencing (Proc Natl Acad Sci USA, 2012, 109 (36): 14508-14513). Examples of such a method for single-molecule real-time sequencing include a method of adding adaptors having a hairpin sequence to both ends of each double-stranded fragment to prepare a one cyclic form, continuously sequencing several times a single molecule of the cyclic fragment, and integrating the obtained pieces of sequence information (Nucleic Acids Res, 2010, 38 (15): e159).

[0051] As a result of the sequencing described above, results (read sequences) of reading each of the original fragments obtained by the DNA fragmentation mentioned above are obtained. The number of read sequences obtained for each original fragment can be one or more. Preferably, a plurality of read sequences are obtained for each fragment from the viewpoint of improvement in the accuracy of analysis on mutation tendencies mentioned later. The number of read sequences obtained from one fragment is preferably 2 or more, more preferably 10 or more. On the other hand, the number of read sequences is preferably 5 or less, more preferably 2 or less, from the viewpoint of analysis efficiency.

[0052] The one or more read sequences thus obtained can be used directly in subsequent comparison with the reference sequence. It is preferred to extract bases with high reading reliability of the sequencing from among the bases of the obtained read sequences, from the viewpoint of improvement in the accuracy of the mutation analysis. Preferably, highly reliable bases are extracted from among the corresponding bases of two or more read sequences obtained from one fragment. In the present specification, the extracted highly reliable bases are referred to as “consensus bases”. The extraction of the “consensus bases” can be conducted using a program or the like attached to the next-generation sequencer. More specific examples of the procedures include: a method of extracting, as the “consensus bases”, bases of the same type at corresponding positions between two read sequences obtained from one fragment, or complementary bases at the positions when the two read sequences are complementary strands; a method of comparing bases between two or more read sequences obtained from one fragment, determining a base (including complementary bases in complementary strands) appearing with the largest frequency at each position on the sequences, and extracting these bases as the “consensus bases”; a method of acquiring, as the “consensus bases”, bases with the highest accuracy (quality value) in reading by a sequencer among the bases at corresponding positions of the read sequences; a method of probabilistically determining the “consensus bases” on the basis of quality values, base appearance frequencies, etc.; a method in which, when the corresponding bases are matched among all read sequences obtained from one fragment, the base is determined as the “consensus base”; and a combined method thereof. In the method of the present invention, the extraction of the “consensus bases” may be optionally carried out before or after mapping of the read sequences to the reference sequence mentioned later.

[0053] Subsequently, each of the one or more read sequences obtained by the sequencing from each original fragment is mapped to the reference sequence for sequence comparison. As a result of the comparison, mismatched sites of bases between each of the read sequences and the reference sequence are detected. Preferably, the comparison can be conducted only for the “consensus bases” mentioned above on the read sequences. Examples of the type of the “mismatched site” include a site where the type of a base on the read sequence differs from the reference sequence (substitution site), a site where a base on the read sequence is deleted with respect to the reference sequence (deletion site), and a site where a base is inserted on the read sequence with respect to the reference sequence (insertion site).

[0054] The detected “mismatched site” is obtained as a mutation site in the DNA to be analyzed. More specifically, information on a mutation at the mutation site is obtained. Examples of the information to be obtained include, but are not limited to, the type of the mismatched site (mutation site) (e.g., a substitution site, a deletion site or an insertion site), the type of the base at the site and the type of a base (or a base pair) before the mutation (e.g., the type of a base at a position corresponding to the site on the reference sequence), and the types of both adjacent bases of the site (e.g., the types of both bases adjacent to the position corresponding to the site on the reference sequence). In a preferred embodiment, when the mismatched site is a substitution site, the type of the base at the site and the type of a base before the mutation is obtained as the information; when the mismatched site is a deletion site, the type of a base before the mutation and the types of both adjacent bases of the deletion site are obtained as the information; and when the mismatched site is an insertion site, the type of the base at the site and the types of both adjacent bases of the insertion site are obtained as the information.

[0055] Sites of match bases between the read sequence and the reference sequence can also be detected from the comparison of the read sequence with the reference sequence. These “match sites” can be obtained as mutation-free sites in the DNA to be analyzed. Information on these mutation-free sites can be obtained. Examples of the information to be obtained include the types of the bases at the sites and the types of both adjacent bases of the sites.

[0056] Information on the mutation at the mutation site mentioned above, or information on the mutation-free sites is obtained as to each of the one or more read sequences. The obtained pieces of information can be collected to create a database for mutation analysis. For example, a database of all information on the mutation site obtained from each read sequence may be created; a database may be created in which mutation information obtained from each read sequence is classified by type of the mutation site; a database may be created in which mutation information obtained from each read sequence is classified by type of a base before the mutation (e.g., in the reference sequence) or after the mutation at the mutation site; a database may be created in which mutation information obtained from each read sequence is classified by base length of the mutation site (e.g., length of an insertion, deletion or substitution site); or a database may be created by combining these classifications. Alternatively, a database may be created in which information on the mutation site and information on the mutation-free sites are unified. For example, a database may be created in which the information on the mutation site and the information on the mutation-free sites are compiled by type of a base (A, T, G and C) before the mutation (e.g., in the reference sequence). Alternatively, a database may be created together with information on whether the identified position of the mutation site on the genome corresponds to a coding region or a noncoding region of a gene and, if the mutation site is in the coding region, information on whether the coding region is an intron or an exon or resides in a strand to be transcribed into RNA or not.

[0057] The detection of the “mismatched site” and the obtainment of information on the mutation site or the mutation-free sites mentioned above may be conducted for all the read sequences obtained by the sequencing, or may be conducted for part of read sequences. The total amount of the read sequences used in the detection (total length of the read sequences used) is not particularly limited as long as the amount permits subsequent analysis on the tendencies of mutations. The total amount of the read sequences used is preferably a base length equal to or more than the reciprocal of a mutation frequency, more preferably a base length that is 100 times or more of the reciprocal of a mutation frequency. For example, since a mutation frequency in Example 2 mentioned later is of an order of approximately 1/10⁵ bp, the total length of the read sequences used is preferably 1×10⁵ bp or more, more preferably 1×10⁷ bp or more, even more preferably 1×10⁹ bp or more. The total amount of the read sequences used in the detection is preferably 10 times the amount described above for analyzing the tendency of a mutation having a mutation frequency of an order of 1/10⁶ bp, and is preferably 1/10 times the amount described above for analyzing the tendency of a mutation having a mutation frequency of an order of 1/10⁴ bp. On the other hand, the total amount of the read sequences used in the detection is preferably a base length that is 10,000 times or less of the reciprocal of a mutation frequency, more preferably a base length that is 1,000 times or less of the reciprocal of a mutation frequency, even more preferably a base length that is 100 times or less of the reciprocal of a mutation frequency, from the viewpoint of analysis efficiency. For example, the total amount of the read sequences used in the detection is preferably 1×10¹⁰ bp or less, more preferably 1×10⁹ bp or less, even more preferably 1×10⁸ bp or less, even more preferably 1×10⁷ bp or less, even more preferably 1×10⁶ bp or less. The database for mutation analysis may be created on the basis of information on all mutation sites or mutation-free sites obtained or may be created on the basis of information only on part of sites as long as the database permits subsequent analysis on the tendencies of mutations.

[0058] In the conventional methods (e.g., Non Patent Literatures 4 and 5), a plurality of read sequences corresponding to a specific site of a reference sequence are obtained. Then, when the same type of a mismatched base is found with a given frequency at the same site among the plurality of read sequences, the site is determined as a mutation site in the DNA to be analyzed. This method might overlook a low-frequency mutation. Also, this method restricts a DNA region for mutation detection to a region having a limited length and having overlaps of the plurality of read sequences and requires a great deal of data for overlapping reads. Therefore, enormous time and labor are required in this method for conducting analysis over a wide region of DNA and determining mutation tendencies as a whole.

[0059] On the other hand, the method of the present invention is free from such determination of mutation sites based on the appearance frequencies of mismatched bases among read sequences. The method of the present invention basically involves obtaining mutation information based on the comparison of each of one or more read sequences corresponding to a specific site of a reference sequence, with the reference sequence, and optionally classifying the obtained information, and creating a database. The tendencies of mutations in the DNA to be analyzed are analyzed on the basis of the database. For example, statistical analysis using arbitrary components contained in the database as a sample population (e.g., mutation frequency analysis or mutation pattern analysis) can be conducted.

[0060] The method of the present invention is capable of detecting a low-frequency mutation without overlook because the respective mutation information is obtained as to each read sequence. Furthermore, the method of the present invention is capable of detecting and analyzing mutations in various regions on DNA, which correspond to any of the read sequences used in the mutation detection. Thus, the method of the present invention can detect mutations in a higher-throughput and more highly sensitive manner than the conventional methods and therefore achieves more efficient and more accurate mutation analysis.

### (2-1. Detection of Mutation in Each Fragment Using Next-Generation Sequencer)

[0061] In a preferred embodiment of the method of the present invention, procedures of sequencing DNA fragments using a next-generation sequencer which conducts PCR, and analyzing mutations in the DNA to be analyzed by comparison with the reference sequence will be described below in detail.

[0062] Adaptor sequences for sequencing are added to both ends of each fragment to be sequenced derived from the DNA to be analyzed. The adaptor-added fragment is amplified by PCR to an amount detectable by sequencing with a next-generation sequencer. The amplified fragment is sequenced, and the sequenced sequence is output as a read sequence. In a preferred embodiment of the present invention, two read sequences (read 1 and read 2) are obtained per amplified fragment. In this respect, read 1 corresponds to the sequence of the original fragment read by the sequencing, while read 2 corresponds to a complementary strand thereof. In the case of preparing a fragment having a size less than twice the read length of the sequencer, read 1 and read 2 of each amplified fragment contain at least a portion of the fragment as a common region and each further contain an upstream region or a downstream region thereof. One conjugated read sequence is constructed for each amplified fragment by merging the sequenced read 1 and read 2 at the common region. The construction of the conjugated read sequence from two read sequences can be carried out using software such as PEAR (Bioinformatics, 2014, 30 (5): 614-620), FLASH (Bioinformatics, 2011, 27 (21): 2957-2963), or PANDAseq (BMC Bioinformatics, 2012, 13: 31).

[0063] Subsequently, each read sequence is mapped onto the reference sequence for comparison. In a preferred embodiment, the comparison can be conducted only for the “consensus bases” mentioned above on the read sequence, for improvement in comparison accuracy. In another preferred embodiment, a conjugated read sequence is used as the read sequence in the comparison, for improvement in comparison accuracy. More preferably, a region to be compared with the reference sequence in the conjugated read sequence is restricted to the overlapping region of read 1 and read 2, and the bases on the conjugated read sequence for use in the comparison are restricted to bases complementary between read 1 and read 2 (i.e., the “consensus bases”). These procedures can reduce the adverse effects of a sequencing error on the sequence comparison. The restriction to the “consensus bases” may be carried out before mapping to the reference sequence or may be carried out after mapping to the reference sequence.

[0064] A site of a mismatch base (mutation site) in each read sequence with respect to the reference sequence can be detected by the mapping to and comparison with the reference sequence. Mutation information including the type of the mutation site (a substitution site, a deletion site, or an insertion site), the type of the base at the site, the type of a base before the mutation, the types of both adjacent bases of the site, etc. can be further obtained. These procedures are conducted on the read sequences derived from each original fragment obtained by the sequencing to collect mutation information. A database of the mutation information from each read sequence can be created. These procedures may be sequentially conducted on the read sequences one by one or may be conducted in parallel on a plurality of read sequences.

[0065] In the aforementioned procedures of mapping the read sequence to the reference sequence, restricting a region for comparison, marking a site of a mismatch base with respect to the reference sequence, and obtaining mutation information on the site, for example, the mapping can be carried out using Bowtie 2 software (Nature Methods, 2012, 9 (4): 357-359) or BWA software (Bioinformatics, 2009, 25 (14): 1754-1760); the restriction of a region for comparison and the marking of a mismatch base with respect to the reference sequence can be carried out using Samtools software (Bioinformatics, 2009, 25 (16): 2078-2079); and the obtainment of mutation information on the site can be carried out using, for example, a program to detect bases different from those of the reference sequence, which is created using a programming language such as Python. However, the software or the programming language for conducting the procedures for the method of the present invention is not limited thereto.

### (2-2. Mutation Analysis in Cell Population)

[0066] The tendencies of mutations in a cell population can be investigated on the basis of the obtained mutation information database. Preferably, examples of the mutations to be analyzed according to the present invention include base pair substitution mutations which change a base pair in DNA to a different base pair, and short insertion or deletion mutations which cause the insertion or deletion of a short nucleotide sequence in the sequence of DNA. Examples of the base pair substitution mutation include one-base pair substitution mutation, and multi-base pair substitution mutation such as two-base pair or three-base pair or more substitution. Among them, one-base pair substitution mutations are preferably analyzed in the present invention. According to the present invention, the mutation patterns and mutation frequencies of these mutations allow to be determined. Hereinafter, procedures for the analysis will be described in detail.

### (2-2-1. Analysis of Base Pair Substitution Mutations)

[0067] In one embodiment, a one-base pair substitution mutations are analyzed. In the present embodiment, as mentioned above, each of one or more read sequences obtained from each original fragment is compared with the reference sequence to detect a site of a base in each read sequence mismatched with respect to the reference sequence. The detected sites are obtained as mutation sites each having a base pair substitution mutation with respect to the reference sequence. Subsequently, each of the mutations is classified according to base mutation patterns on the basis of the type of the base at the detected mutation site and a base before the mutation. Subsequently, respective appearance frequencies of the base mutation patterns thus obtained are determined. These procedures can be conducted with, for example, the aforementioned program created using a programming language such as Python.

[0068] In a more specific example, the bases contained in the read sequences are divided into the following bases (i) to (iv):

[0069] (i) a base located at a position where the base on the reference sequence is A,

[0070] (ii) a base located at a position where the base on the reference sequence is T,

[0071] (iii) a base located at a position where the base on the reference sequence is G, and

[0072] (iv) a base located at a position where the base on the reference sequence is C.

[0073] The bases (i) and (ii) are bases present at sites where the base pair on the reference sequence is AT. The bases (iii) and (iv) are bases present at sites where the base pair on the reference sequence is GC. From among these bases, a mismatch base (i.e., base having a base pair substitution mutation) with respect to the reference sequence is detected. Subsequently, as to each of the mutated bases thus detected, a base pair before the mutation at the mutation site is determined from the base information on the reference sequence on the basis of the classification of the bases (i) to (iv), and a base pair after the mutation is also determined from the base information on each read sequence. From these data, each mutation can be classified into 6 base pair mutation patterns in total: 3 patterns when the base pair before the mutation is AT [AT→TA, AT→CG, and AT→GC]; and 3 patterns when the base pair before the mutation is GC [GC→TA, GC→CG, and GC→AT]. The appearance frequency of each of the mutation patterns can be determined on the basis of the total number of mutations belonging to the each of the mutation patterns and the total number of bases analyzed. For example, the appearance frequencies of 3 types of mutation patterns can be calculated for each of the AT and GC base pairs on the basis of the total number of bases analyzed on the each of the base pairs.

[0074] The mutation pattern of each mutation thus obtained can be further classified according to an original base. The original base at a mutation site where the base pair before the mutation is AT is A or T, and the original base at a mutation site where the base pair before the mutation is GC is G or C. Thus, each of the 6 base pair mutation patterns can be further classified into 2 groups according to an original base. Such classification is useful for removing a reading error of the sequencing due to base modification in the process of DNA extraction or isolation from cells. Particularly, it is known that the G base is susceptible to chemical modification by oxidation in the process of DNA preparation that causes error to misread G as T. Normally, since a mutation in base pair alters both bases constituting the base pair, mutation frequencies of the 2 groups of the base pair mutation pattern classified according to an original base are supposed to be equivalent. If the mutation frequency is biased to either of the original bases, this suggests a sequencing error attributed to base modification.

[0075] In an alternative embodiment of the present invention, multi-base pair substitution mutations are analyzed. Examples of the multi-base pair substitution mutation include two-base pair substitution mutation and three-base pair substitution mutation. In the case of analyzing multi-base pair substitution mutations, for example, each mutation pattern is classified according to a nucleotide sequence before the mutation (e.g., into 4×4=16 patterns for the two-base pair substitution). Subsequently, the appearance frequency of each mutation pattern can be determined on the basis of the total number of mutations belonging to the each mutation pattern and the total number of mutations analyzed.

### (2-2-2. Sequence Context Analysis)

[0076] In recent years, an approach of mathematically extracting a factor of mutation caused by a mutagen (mutation signature) from mutation information accumulated on the genome of cancer cells has been proposed. Various mutation signatures have been identified from mutation information accumulated in the genome in various human cancers (Cell Rep, 2013, 3: 246-0.259). In the theory of the mutation signatures, the mutation pattern of base pair substitution mutation is classified on the basis of a sequence context in upstream and downstream of the position of the base pair. The base pair substitution mutation can be analyzed in more detail by sequence context analysis.

[0077] Thus, in an alternative embodiment, procedures for the sequence context analysis of a one-base pair substitution mutation will be given below. In the present embodiment, as mentioned above, each read sequence is first compared with the reference sequence to detect a one-base pair substitution mutation in the read sequence. Subsequently, as to each detected mutation, a sequence (so-called context) including a base before the mutation and adjacent upstream and downstream bases of the base before the mutation is determined on the basis of the reference sequence. Subsequently, each mutation is typed according to base pair mutation patterns and the context. Specifically, the detected mutations are divided into 6 base pair mutation patterns [AT→TA, AT→CG, AT→GC, GC→TA, GC→CG, and GC→AT] by the same procedures as in the paragraph (2-2-1.) mentioned above. Meanwhile, each detected mutation is classified according to the context. For example, a context of 3 bases long including adjacent bases one upstream and one downstream of the mutation site is classified into 4×4=16 groups [e.g., ACA, ACC, ACG, ACT, CCA, CCC, CCG, CCT, GCA, GCC, GCG, GCT, TCA, TCC, TCG, and TCT for mutations from C]. As a result, each mutation is classified into 96 types (4×6×4) in total according to the base pair mutation patterns and the context. The sequence of the context for use in this analysis can consist of a base before the mutation, one or more adjacent upstream bases of the base before the mutation, and one or more adjacent downstream bases of the base before the mutation. Also, the length of the context can be 3 bases or more, though not limited thereto. If necessary, a longer context may be analyzed. For example, each mutation is classified into 256 groups (4×4×4×4) according to a context of 5 bases long including adjacent bases two upstream and two downstream of the mutation site. In this case, each mutation is finally classified into 1536 (4×4×6×4×4) types in total by the classification and 6 base pair patterns. Furthermore, each mutation is classified into 42n groups according to a context of 2n+1 bases long including adjacent bases n upstream and n downstream of the mutation site. In this case, each mutation is finally classified into 42n×6 types in total by the classification and 6 base pair patterns. Subsequently, respective mutation frequencies of these mutation types can be determined on the basis of the total number of mutations belonging to each of the mutation types and the total number of bases analyzed.

### (2-2-3. Analysis of Short Insertion or Deletion Mutations)

[0078] In a further alternative embodiment, short insertion or deletion mutations are analyzed. In the present embodiment, as mentioned above, each read sequence is compared with the reference sequence to detect a site where a base is inserted or deleted in the read sequence with respect to the reference sequence. The detected site is obtained as a mutation site having an insertion or deletion mutation with respect to the reference sequence. Further, as to each obtained mutation, the type of the mutation (an insertion mutation or a deletion mutation), the base length of the insertion or deletion site, and/or the type of the inserted or deleted base are determined. In the present embodiment, the insertion or deletion site to be detected is preferably a site having an inserted or deleted base length of 10 bp or less, more preferably 1 to 5 bp, though not limited thereto. The procedures of detecting an insertion or deletion site having a specific base length can be conducted using the aforementioned program created using a programming language such as Python. In addition, the type of the inserted or deleted base can be identified by the comparison of each read sequence with the reference sequence. The base length of an insertion or deletion site in each read sequence, and/or the type of the base at the insertion or deletion site can be determined by these procedures. Subsequently, a frequency of the insertion or deletion is determined for each of the base lengths and/or each of the types of the bases thus determined. For example, the insertion or deletion mutations obtained for respective read sequences can be classified by base length to determine their respective frequencies. For example, the inserted or deleted bases can be classified by type (A, T, G, and C) to determine their respective frequencies. Furthermore, mutations can be classified in more detail by combining the classification by base length and the classification by base type to determine their respective frequencies.

### (2-3. Analysis of Increased Mutation Frequency)

[0079] The mutations detected by the comparison of the read sequences with the reference sequence according to the procedures mentioned above may contain a base reading error of the sequencing. For more highly accurate mutation analysis, it is preferred to remove this error component. The removal of the error component can be conducted by subtracting mutation frequency of a control cell population from mutation frequency of the subject cell population. When the subject cell population is a cell population exposed to a specific condition, the influence of the specific condition on a mutation frequency may be analyzed by determining the difference in the mutation frequency between the subject cell population and the control. For example, when the subject cell population is a cell population exposed to a specific condition such as a cell population exposed to a mutagen or a cell population given a drug, the same cell population unexposed to the condition is used as the control cell population. This control cell population is analyzed by the same procedures as above for base pair substitution mutation, sequence context, or insertion or deletion mutation to determine mutation frequencies. The mutation frequency of the control cell population thus obtained is subtracted from the mutation frequency of the subject cell population. As a result, the sequencing error component is removed from the mutation frequency of the subject cell population, while the presence or absence of increase in the mutation frequency due to the specific condition, or an increased mutation frequency with respect to the control under the specific condition can be investigated. It is more preferred to analyze mutation frequencies on the basis of the aforementioned classification according to an original base, because a sequencing error attributed to base modification can be detected.

### 3. Application

[0080] The aforementioned method for analyzing mutations according to the present invention is capable of quantitatively and qualitatively analyzing mutations in a cell population. The analysis method of the present invention can be applied to various analyses or evaluations associated with mutations. Typical examples of the application include methods for evaluating the genotoxicity of a substance, methods for evaluating tumorigenic mutations (e.g., methods for evaluating mutations in cancer cells, and evaluating mutations in cfDNA), and the quality control of cultured cells (e.g., the evaluation of genetic information such as the evaluation of the presence or absence of mutations, or mutation types).

[0081] Thus, in a preferred embodiment, the present invention provides a method for evaluating the genotoxicity of a test substance. Specific procedures for the method will be described below.

### (3-1. Method for Evaluating Genotoxicity of Substance)

### (3-1-1. Evaluation Based on Analysis of Base Pair Substitution Mutation)

[0082] In one embodiment, the method for evaluating the genotoxicity of a test substance according to the present invention is based on the analysis of a base pair substitution mutation mentioned above. This method comprises:

(1) obtaining DNAs from a test group, the test group is a cell population exposed to the test substance;
(2) sequencing fragments of the DNAs to obtain one or more read sequences per fragment;
(3) comparing each of the one or more read sequences with a reference sequence to detect sites of mismatch bases between the each read sequence and the reference sequence, wherein the reference sequence is a known sequence in the DNAs;
(4) obtaining the sites detected in the step (3) as sites of mutation each having a base pair substitution mutation;
(5) classifying each of the obtained mutations according to base pair mutation patterns; and
(6) determining respective mutation frequencies of the mutation patterns obtained in the step (5).

[0083] The steps (1) to (6) are as mentioned above in the paragraph (2.), particularly, the paragraph (2-2-1.). More specifically, in the case of analyzing one-base pair substitution mutations, in the step (5), each mutation is classified into 3 mutation patterns [AT→TA, AT→CG, and AT→GC] as to sites where the base pair on the reference sequence is AT, and classified into 3 mutation patterns [GC→TA, GC→CG, and GC→AT] as to sites where the base pair on the reference sequence is GC. Preferably, these classifications are combined and mutations are classified into 6 base pair mutation patterns in total. Each of these 6 base pair mutation patterns is further divided into 2 groups on the basis of the types of the original bases (A or T for AT, or G or C for GC). Thus, mutations may be classified into 12 mutation patterns in total. Subsequently, in the step (6), respective mutation frequencies of the mutation patterns determined in the step (5) are determined. As a result, the mutation frequency of each base pair mutation pattern can be determined.

[0084] In a preferred embodiment, the method described above further comprises:

(7) conducting the same procedures as in the steps (1) to (6) on a control group, the control group is a cell population unexposed to the test substance, thereby determining respective mutation frequencies of the base pair mutation patterns in the control group; and
(8) subtracting the respective mutation frequencies of the mutation patterns in the control group obtained in the step (7) from the respective mutation frequencies of the mutation patterns in the test group obtained in the step (6).

[0085] As a result, increased mutation frequencies in the test group without being influenced by sequencing error can be determined.

### (3-1-2. Evaluation Based on Sequence Context Analysis)

[0086] In a further embodiment, the method for evaluating the genotoxicity of a test substance according to the present invention is based on the sequence context analysis mentioned above. This method comprises:

(1′) obtaining DNAs from a test group, the test group is a cell population exposed to the test substance;
(2′) sequencing fragments of the DNAs to obtain one or more read sequences per fragment;
(3′) comparing each of the one or more read sequences with a reference sequence to detect sites of mismatch bases between the each read sequence and the reference sequence, wherein the reference sequence is a known sequence in the DNAs;
(4′) obtaining the sites detected in the step (3′) as sites of mutation each having a base pair substitution mutation;
(5′) as to each of the mutations thus obtained, determining a context sequence comprising a base before mutation and adjacent upstream and downstream bases of the base before mutation, the context sequence is determined on the basis of the reference sequence;
(6′) typing each of the mutations obtained in the step (4′) according to the context sequence determined in the step (5′) and the type of the base after mutation; and
(7′) determining respective mutation frequencies of the mutation types obtained in the step (6′).

[0087] The steps (1′) to (7′) are as mentioned above in the paragraph (2.), particularly, the paragraph (2-2-2.). More specifically, in the step (6′), each mutation is classified into 96 types in total on the basis of the 6 base pair mutation patterns mentioned above [AT→TA, AT→CG, AT→GC, GC→TA, GC→CG, and GC→AT] and 16 groups according to the types of both adjacent bases of the mutation site [e.g., ACA, ACC, ACG, ACT, CCA, CCC, CCG, CCT, GCA, GCC, GCG, GCT, TCA, TCC, TCG, and TCT for mutations from C]. Subsequently, in the step (7′), respective mutation frequencies of the mutation types determined in the step (6′) are determined. As a result, mutation types and mutation frequencies can be determined.

[0088] In a preferred embodiment, the method described above further comprises:

(8′) conducting the same procedures as in the steps (1′) to (7′) on a control group, the control group is a cell population unexposed to the test substance, thereby determining respective mutation frequencies of the mutation types in the control group; and
(9′) subtracting the respective mutation frequencies of the mutation types in the control group obtained in the step (8′) from the respective mutation frequencies of the mutation types in the test group obtained in the step (7′).

[0089] As a result, increased mutation frequencies in the test group without being influenced by sequencing error can be determined.

### (3-1-3. Evaluation Based on Analysis of Short Insertion or Deletion Mutation)

[0090] In a further embodiment, the method for evaluating the genotoxicity of a test substance according to the present invention is based on the analysis of a short insertion or deletion mutation mentioned above. This method comprises:

(1″) obtaining DNAs from a test group, the test group is a cell population exposed to the test substance;
(2″) sequencing fragments of the DNAs to obtain one or more read sequences per fragment;
(3″) comparing each of the one or more read sequences with a reference sequence to detect sites of base insertion or deletion in the each read sequence with respect to the reference sequence, wherein the reference sequence is a known sequence in the DNAs;
(4″) obtaining the sites detected in the step (3″) as sites of mutation each having an insertion or deletion mutation;
(5″) as to each of the mutations thus obtained, determining the base length of the insertion or deletion and/or the type of the inserted base; and
(6″) determining respective mutation frequencies for the sites of the insertion or deletion mutations with different base lengths of the insertion or deletion and/or different types of the inserted bases determined in the step (5″).

[0091] The steps (1″) to (6″) are as mentioned above in the paragraph (2.), particularly, the paragraph (2-2-3.). More specifically, in the step (3″), a site of insertion or deletion in each read sequence wherein base length of the insertion or deletion is preferably 10 bp or less, more preferably 1 to 5 bp, is detected by comparison with the reference sequence. When an insertion or deletion has been detected, the type of the inserted or deleted base can be further identified by the comparison of each read sequence with the reference sequence. As a result, the base length of the insertion or deletion site in the each read sequence, and/or the type of the inserted or deleted base can be determined (step (5″)). Subsequently, in the step (6″), respective mutation frequencies are determined for the sites of the insertion or deletion mutations with different base lengths of the insertion or deletion and/or different types of the inserted or deleted bases determined in the step (5″). As a result, mutation patterns and mutation frequencies can be determined.

[0092] In a preferred embodiment, the method described above further comprises:

(7″) conducting the same procedures as in the steps (1″) to (6″) on a control group, the control group is a cell population unexposed to the test substance, thereby determining respective mutation frequencies for each of the sites of the insertion or deletion mutations with different base lengths of the insertion or deletion and/or different types of the inserted or deleted bases in the control group; and
(8″) subtracting the respective mutation frequencies in the control group obtained in the step (7″) from the respective mutation frequencies for each of the sites of the insertion or deletion mutations with different base lengths of the insertion or deletion and/or different types of the inserted or deleted bases in the test group obtained in the step (6″).

[0093] As a result, increased mutation frequencies in the test group without being influenced by sequencing error can be determined.

[0094] The method for evaluating the genotoxicity of a test substance according to the present invention is capable of analyzing the tendencies of mutations at a cell population level as to a population of cells which might have different mutations by exposure to a test substance. Thus, according to the present invention, information which reflects better the actual influence of the test substance in vivo can be obtained as compared with the conventional single cell-based analysis methods (e.g., Non Patent Literatures 4 and 5). Furthermore, according to the present invention, the influence of the test substance on a cell population can be quantitatively and qualitatively analyzed at a level of individual bases on DNA. Hence, more detailed information on the genotoxicity of the test substance can be obtained.

### (3-2. Method for Evaluating Tumorigenic Mutation)

### (3-2-1. Method for Evaluating Mutation in Cancer Cell)

[0095] In an alternative preferred embodiment, the present invention provides a method for evaluating mutations in cancer cells. Specific procedures for the method are basically the same as in the aforementioned method for evaluating the genotoxicity of a test substance except that a population of cancer cells is used as the test group. Alternatively, a population of cells suspected of having cancer or cells to be evaluated for the risk of cancerization may be used as the test group, instead of the cancer cell population. A population of non-cancer cells (e.g., normal cells) or a population of cells with a low risk of cancerization is used as the control group. This method is useful for identifying the tendencies of cancer type-specific mutations, evaluating the risk of cancerization, or confirming the stage of progression or malignancy of cancer. As for the evaluation of mutations in cancer cells, more detailed analysis is achieved by the sequence context analysis as described in the paragraph (2-2-2.). It has previously been reported that in the genome analysis of human cancers, mutations were classified into 96 groups (4×6×4) on the basis of 3-base contexts or 1536 groups (4×4×6×4×4) on the basis of 5-base contexts (Cell Rep, 2013, 3: 246-259).

[0096] The method for evaluating mutations in cancer cells according to the present invention is capable of identifying the tendencies of the cancer type-specific mutations in the whole cancer cell population, unlike the conventional methods for analyzing mutations at a specific site on the genome, i.e., methods for extracting only mutations which appear at a given or higher rate in cells in cancer tissues by the selection in the cancer tissues, such as methods which involve aligning and comparing a plurality of read sequences at the same location on the genome (e.g., Non Patent Literatures 4 and 5). Mutations in cancer cells reportedly vary in quantity or quality depending on the type of cancer (Nature, 2013, 500 (7463): 415-421). The method of the present invention is capable of quantitatively and qualitatively analyzing the tendencies of mutations in a cancer cell population and is therefore supposed to be useful in the diagnosis of the progression stage or type of cancer.

[0097] The conventional analysis of mutation signatures involves: sequencing genomic DNA obtained from each person within a population considered to have tumor induced by a specific cause; extracting mutations which appear at a given or higher rate in cancer tissues according to a conventional method (e.g., Non Patent Literature 4 or 5); then conducting sequence context analysis on the extracted mutations; subsequently compiling mutation information obtained from each person; and identifying mutation signatures within the population. However, in the case of analyzing a mutation signature in the diagnosis of an individual, it might be difficult to determine the similarity of the obtained sequence contexts to known mutation signatures, due to a small number of mutations identified. On the other hand, according to the present invention, sequence context data having quality that permits confirmation of similarity to mutation signatures can be obtained by single next-generation sequencing analysis, as shown in FIG. 7 and FIG. 8. This is because, unlike the conventional methods, the number of mutations sufficient for sequence context analysis can be secured by adding to analytes mutations which fall short of the given or higher rate. Thus, the method of the present invention is considered exploitable in the high-throughput sequence context analysis of mutations in an individual.

(3-2-2. Method for Evaluating Mutation in cfDNA)

[0098] In an alternative preferred embodiment, the present invention provides the analysis of cell-free DNA (cfDNA) in blood. The cfDNA has received attention as to a low invasive method for diagnosing tumorigenesis in humans. The cfDNA is obtained from biopsy from liquid such as plasma, serum, or urine. Specific procedures for the application of the method to the cfDNA analysis are basically the same as in the aforementioned method for evaluating the genotoxicity of a test substance except that cfDNA in liquid biopsies harvested from human cancer patients or the like is used as the DNA of the test group, instead of the DNA obtained from the cancer cell population. For example, cfDNA derived from healthy humans or cfDNA harvested from the same humans in advance before development of cancer is used as the control group. This method is useful for identifying the tendencies of cancer patient-specific mutations in cfDNA or confirming the progression stage or malignancy of cancer.

[0099] The method for evaluating mutations in cfDNA according to the present invention is capable of identifying the tendencies of the cancer type-specific mutations in the whole cancer cell population, unlike the conventional analysis methods, i.e., methods for extracting only mutations occupying a given proportion in cfDNA and predicted to appear at a given rate in cells in cancer tissues, such as methods which involve adding a unique tag sequence to each molecule of cfDNA, obtaining consensus sequences of a plurality of read sequences obtained from the same molecule, and then aligning and comparing the plurality of read sequences at the same location on the genome (see Non Patent Literatures 6 and 7). As for the evaluation of mutations in cfDNA, more detailed analysis is achieved by the sequence context analysis as described in the paragraph (2-2-2.). The method of the present invention is low invasive and is useful for, for example, identifying the tendencies of cancer cell-specific mutations, confirming the progression stage or malignancy of cancer, or detecting microscopic tumor at an early stage of progression. Thus, the method of the present invention may be applied to routine examination of cancer, medical checkup, etc.

### (3-3. Method for Evaluating Genetic Information in Cultured Cell)

[0100] In an alternative preferred embodiment, the present invention provides a method for evaluating genetic information in cultured cells. Specific procedures for the method are basically the same as in the aforementioned method for evaluating the genotoxicity of a test substance except that a population of cultured cells to be examined for the presence or absence of mutations is used as the test group. Examples of the test group include cells subcultured for a certain period, wherein the tendencies of mutations therein are to be confirmed. A population of cells which are cultured cells of the same type as in the test group and have known genetic information (e.g., cells wherein the presence or absence of mutations and mutation types thereof have already been confirmed) is used as the control group. Examples of the control group include cells before subculture. This method allows to evaluate the presence or absence of mutations in cultured cells or mutation types thereof. The method is useful for the quality control of cultured cells.

[0101] The method for evaluating genetic information in cultured cells according to the present invention is capable of identifying the tendencies of mutations specific for the cultured cells in the cultured cell population, rather than mutations in individual cells. This method allows to evaluate whether or not cultured cells such as iPS cells retain genetic quality (whether or not the cultured cells have mutations). For example, genetic quality control in the preparation of human-derived iPS cells is very important for the clinical application thereof. It has been reported that various mutations occur in the genome of iPS cells in the process of their establishment. These mutations might lead to carcinogenesis, etc. after transplantation to patients. Thus, genetic quality control thereof is essential (Nature, 2011, 471 (7336): 63-67). Use of the method of the present invention permits convenient grasping of the tendencies of mutations in a population of iPS cells. Furthermore, the method of the present invention is a highly comprehensive method as compared with a generally-using conventional method for evaluating the quality of iPS cells by use of PCR, and can be very inexpensive as compared with another conventional method for tumorigenesis using SCID mice (PLoS One, 2012, 7 (5): e37342). Thus, the method of the present invention may also be useful as a convenient and inexpensive screening approach for the genetic quality control of iPS cells.

### (3.4. Various Conditions)

[0102] In any of the embodiments described above, a known sequence in the DNA of a cell population of a test group can be used as the reference sequence. It is preferred to use a sequence registered in a public database or the like as the reference sequence. A sequence in the genomic DNA of the cell population, sequenced in advance using a sequencer or the like prior to the method of the present invention may be used as the reference sequence.

[0103] The test substance used in the method for evaluating the genotoxicity of a test substance according to the present invention is not particularly limited as long as the substance is to be evaluated for its genotoxicity. Examples thereof include substances suspected of having genotoxicity, substances for which the presence or absence of genotoxicity is to be confirmed, and substances to be examined for the types of inducible mutations. The test substance may be a naturally occurring substance or may be a substance artificially synthesized by a chemical or biological method or the like. The test substance may be a compound or may be a composition or a mixture. Alternatively, the test substance may be ultraviolet ray, radiation, or the like.

[0104] The approach of exposing the cell population to the test substance is not particularly limited and can be appropriately selected according to the type of the test substance. Examples thereof include a method of adding the test substance to a medium containing the cell population, and a method of leaving the cell population in an atmosphere containing the test substance.

[0105] Examples of the cell population used in the method of the present invention include specimens harvested from animals or plants, and populations of animal-, plant- or microbe-derived cultured cells and preferably include populations of animal, plant or microbe strain-derived cultured cells. Examples of the animal preferably include mammals such as humans, silkworms, and nematodes. Examples of the microbes preferably include E. coli, Salmonella, and yeasts.

[0106] Among the cell populations listed above, preferably, a population of microbe strain-derived cultured cells is used in the method for evaluating the genotoxicity of a test substance. More preferably, at least one cell population selected from the group consisting of a population of E. coli cells and a population of Salmonella cells is used. Preferred examples of the Salmonella include a S. typhimurium LT-2 strain, and S. typhimurium TA100 strain, TA98 strain, TA1535 strain, TA1538 strain, and TA1537 strain which are used in the Ames test. Preferred examples of the E. coli include a WP2 strain and a WP2 uvrA strain which are also used in the Ames test.

[0107] Examples of the type of the cancer cells which can be used in the present invention include, but are not particularly limited to, cells of lung cancer, breast cancer, prostate cancer, tongue cancer, laryngeal or pharyngeal cancer, digestive organ cancer (e.g., esophageal cancer, stomach cancer, duodenum cancer, large intestine cancer, colon or rectum cancer, etc.), liver cancer, pancreatic cancer, cervical cancer, uterine corpus cancer, renal cell cancer, renal pelvic cancer, bladder cancer, brain tumor, bone tumor, leukemia, lymphoma, myeloma, skin cancer, and malignant melanoma. These cancer cells may be derived from specimens harvested from animals or may be a cultured cancer cell line.

[0108] The present specification further discloses the following substances, production methods, use, methods, etc. as exemplary embodiments of the present invention. However, the present invention is not limited by these embodiments.

[1] A method for evaluating the genotoxicity of a test substance, comprising:
(1) obtaining DNAs from a test group, the test group is a cell population exposed to the test substance;
(2) sequencing fragments of the DNAs to obtain one or more read sequences per fragment;
(3) comparing each of the one or more read sequences with a reference sequence to detect sites of mismatch bases between the each read sequence and the reference sequence, wherein the reference sequence is a known sequence in the DNAs;
(4) obtaining the sites detected in the step (3) as sites of mutation each having a base pair substitution mutation;
(5) classifying each of the obtained mutations according to base pair mutation patterns; and
(6) determining respective mutation frequencies of the mutation patterns obtained in the step (5).
[2] The method according to [1], preferably, further comprising

[0109] extracting, from the bases of the read sequences obtained in the step (2), bases with high reading reliability of the sequencing, wherein

[0110] the step (3) comprises comparing the extracted bases on the read sequences with the bases of the reference sequence.

[3] The method according to [1], preferably, further comprising extracting bases with high reading reliability of the sequencing among the bases of the sites detected by the comparison of the read sequences with the reference sequence in the step (3).
[4] The method according to any one of [1] to [3], wherein preferably, the steps (3) to (5) comprise:

[0111] dividing bases contained in the read sequences into the following bases (i) to (iv):
[0112] (i) a base located at a position where the base on the reference sequence is A,
[0113] (ii) a base located at a position where the base on the reference sequence is T,
[0114] (iii) a base located at a position where the base on the reference sequence is G, and
[0115] (iv) a base located at a position where the base on the reference sequence is C;

[0116] detecting mismatch bases with respect to the reference sequence from among the bases contained in the read sequences, and obtaining sites of the detected bases as sites of mutation each having a base pair substitution mutation;

[0117] obtaining base pairs before mutation and after mutation at the respective sites of mutation of the detected mismatch bases; and

[0118] classifying the base pair substitution mutations at the sites of mutation, according to the types of the base pairs before mutation and the base pairs after mutation, into 6 of base pair mutation patterns: AT→TA, AT→CG, AT→GC, GC→TA, GC→CG, and GC→AT.

[5] The method according to [4], preferably, further comprising classifying each of the 6 base pair mutation patterns into 2 groups according to an original base.
[6] The method according to any one of [1] to [5], preferably, further comprising:
(7) conducting the same procedures as in the steps (1) to (6) on a control group, the control group is a cell population unexposed to the test substance, thereby determining respective mutation frequencies of the base pair mutation patterns in the control group; and
(8) subtracting the respective mutation frequencies of the mutation patterns in the control group obtained in the step (7) from the respective mutation frequencies of the mutation patterns in the test group obtained in the step (6).
[7] A method for evaluating the genotoxicity of a test substance, comprising:
(1′) obtaining DNAs from a test group, the test group is a cell population exposed to the test substance;
(2′) sequencing fragments of the DNAs to obtain one or more read sequences per fragment;
(3′) comparing each of the one or more read sequences with a reference sequence to detect sites of mismatch bases between the each read sequence and the reference sequence, wherein the reference sequence is a known sequence in the DNAs;
(4′) obtaining the sites detected in the step (3′) as sites of mutation each having a base pair substitution mutation;
(5′) as to each of the mutations thus obtained, determining a context sequence comprising a base before mutation and adjacent upstream and downstream bases of the base before mutation, the context sequence is determined on the basis of the reference sequence;
(6′) typing each of the mutations obtained in the step (4′) according to the context sequence determined in the step (5′) and the type of the base after mutation; and
(7′) determining respective mutation frequencies of the mutation types obtained in the step (6′).
[8] The method according to [7], preferably, further comprising

[0119] extracting, from the bases of the read sequences obtained in the step (2′), bases with high reading reliability of the sequencing, wherein

[0120] the step (3′) comprises comparing the extracted bases on the read sequences with the bases of the reference sequence.

[9] The method according to [7], preferably, further comprising extracting bases with high reading reliability of the sequencing among the bases of the sites detected by the comparison of the read sequences with the reference sequence in the step (3′).
[10] The method according to any one of [7] to [9], wherein preferably, the steps (3′) to (6′) comprise:

[0121] dividing bases contained in the read sequences into the following bases (i) to (iv):)
[0122] (i) a base located at a position where the base on the reference sequence is A,
[0123] (ii) a base located at a position where the base on the reference sequence is T,
[0124] (iii) a base located at a position where the base on the reference sequence is G, and
[0125] (iv) a base located at a position where the base on the reference sequence is C;

[0126] detecting mismatch bases with respect to the reference sequence from among the bases contained in the read sequences, and obtaining sites of the detected bases as sites of mutation each having a base pair substitution mutation;

[0127] obtaining base pairs before mutation and after mutation at the respective sites of mutation of the detected mismatch bases;

[0128] classifying the base pair substitution mutations at the sites of mutation, according to the types of the base pairs before mutation and the base pairs after mutation, into 6 of base pair mutation patterns: AT→TA, AT→CG, AT→GC, GC→TA, GC→CG, and GC→AT;

[0129] determining context sequences each consisting of a base before mutation located at each of the sites of mutation, one or more adjacent upstream bases of the base before mutation, and one or more adjacent downstream bases of the base before mutation; and

[0130] typing each of the base pair substitution mutations according to the 6 of base pair mutation patterns and the context sequences.

[11] The method according to [10], wherein preferably, the context sequence is a sequence of 3 bases long including the base before mutation at the mutation site and adjacent bases one upstream and one downstream thereof, and the base pair substitution mutations are typed into 96 groups according to the 6 of base pair mutation patterns and the context sequences of 3 bases long.
[12] The method according to any one of [7] to [11], preferably, further comprising:
(8′) conducting the same procedures as in the steps (1′) to (7′) on a control group, the control group is a cell population unexposed to the test substance, thereby determining respective mutation frequencies of the mutation types in the control group; and
(9′) subtracting the respective mutation frequencies of the mutation types in the control group obtained in the step (8′) from the respective mutation frequencies of the mutation types in the test group obtained in the step (7′).
[13] A method for evaluating the genotoxicity of a test substance, comprising:
(1″) obtaining DNAs from a test group, the test group is a cell population exposed to the test substance;
(2″) sequencing fragments of the DNAs to obtain one or more read sequences per fragment;
(3″) comparing each of the one or more read sequences with a reference sequence to detect sites of base insertion or deletion in the each read sequence with respect to the reference sequence, wherein the reference sequence is a known sequence in the DNAs;
(4″) obtaining the sites detected in the step (3″) as sites of mutation each having an insertion or deletion mutation;
(5″) as to each of the mutations thus obtained, determining the base length of the insertion or deletion and/or the type of the inserted or deleted base; and
(6″) determining respective mutation frequencies for each of the sites of the insertion or deletion mutations with different base lengths of the insertion or deletion and/or different types of the inserted or deleted bases determined in the step (5″).
[14] The method according to [13], preferably, further comprising

[0131] extracting, from the bases of the read sequences obtained in the step (2″), bases with high reading reliability of the sequencing, wherein

[0132] the step (3″) comprises comparing the extracted bases on the read sequences with the bases of the reference sequence.

[15] The method according to [13], preferably, further comprising extracting bases with high reading reliability of the sequencing among the bases of the sites detected by the comparison of the read sequences with the reference sequence in the step (3″).
[16] The method according to any one of [13] to [15], wherein the base length of the sites of the insertion or deletion to be detected is preferably 10 bp or less, more preferably 1 to 5 bp.
[17] The method according to any one of [13] to [16], preferably, further comprising:
(7″) conducting the same procedures as in the steps (1″) to (6″) on a control group, the control group is a cell population unexposed to the test substance, thereby determining respective mutation frequencies for each of the sites of insertion or deletion mutations with different base lengths of the insertion or deletion and/or different types of the inserted or deleted bases in the control group; and
(8″) subtracting the respective mutation frequencies in the control group obtained in the step (7″) from the respective mutation frequencies for each of the sites of the insertion or deletion mutations with different base lengths of the insertion or deletion and/or different types of the inserted or deleted bases in the test group obtained in the step (6″).
[18] The method according to any one of [1] to [12], wherein preferably, the base pair substitution mutation is a one-base pair substitution mutation, a two-base pair substitution mutation, or a three-base pair substitution mutation.
[19] The method according to any one of [1] to [18], wherein preferably, the cell population is at least one cell population selected from the group consisting of a Salmonella cell population and an E. coli cell population.
[20] The method according to [19], wherein preferably, the Salmonella is a S. typhimurium LT-2 strain, TA100 strain, TA98 strain, TA1535 strain, TA1538 strain or TA1537 strain.
[21] A method for evaluating mutations in cancer cells, comprising:
(1) obtaining DNAs from a test group, the test group is a cancer cell population;
(2) sequencing fragments of the DNAs to obtain one or more read sequences per fragment;
(3) comparing each of the one or more read sequences with a reference sequence to detect sites of mismatch bases between the each read sequence and the reference sequence, wherein the reference sequence is a known sequence in the DNAs;
(4) obtaining the sites detected in the step (3) as sites of mutation each having a base pair substitution mutation;
(5) classifying each of the obtained mutations according to base pair mutation patterns; and
(6) determining respective mutation frequencies of the mutation patterns obtained in the step (5).
[22] A method for evaluating genetic information in cultured cells, comprising:
(1) obtaining DNAs from a test group, the test group is a cultured cell population;
(2) sequencing fragments of the DNAs to obtain one or more read sequences per fragment;
(3) comparing each of the one or more read sequences with a reference sequence to detect sites of mismatch bases between the each read sequence and the reference sequence, wherein the reference sequence is a known sequence in the DNAs;
(4) obtaining the sites detected in the step (3) as sites of mutation each having a base pair substitution mutation;
(5) classifying each of the obtained mutations according to base pair mutation patterns; and
(6) determining respective mutation frequencies of the mutation patterns obtained in the step (5).
[23] The method according to [21] or [22], preferably, further comprising

[0133] extracting, from the bases of the read sequences obtained in the step (2), bases with high reading reliability of the sequencing, wherein

[0134] the step (3) comprises comparing the extracted bases on the read sequences with the bases of the reference sequence.

[24] The method according to [21] or [22], preferably, further comprising extracting bases with high reading reliability of the sequencing among the bases of the sites detected by the comparison of the read sequences with the reference sequence in the step (3).
[25] The method according to any one of [21] to [24], wherein preferably, the steps (3) to (5) comprise:

[0135] dividing bases contained in the read sequences into the following bases (i) to (iv):
[0136] (i) a base located at a position where the base on the reference sequence is A,
[0137] (ii) a base located at a position where the base on the reference sequence is T,
[0138] (iii) a base located at a position where the base on the reference sequence is G, and
[0139] (iv) a base located at a position where the base on the reference sequence is C;

[0140] detecting mismatch bases with respect to the reference sequence from among the bases contained in the read sequences, and obtaining sites of the detected bases as sites of mutation each having a base pair substitution mutation;

[0141] obtaining base pairs before mutation and after mutation at the respective sites of mutation of the detected mismatch bases; and

[0142] classifying the base pair substitution mutations at the sites of mutation, according to the types of the base pairs before mutation and the base pairs after mutation, into 6 of base pair mutation patterns: AT→TA, AT→CG, AT→GC, GC→TA, GC→CG, and GC→AT.

[26] The method according to [25], preferably, further comprising classifying each of the 6 base pair mutation patterns into 2 groups according to an original base.
[27] The method according to any one of [21] to [26], preferably, further comprising:
(7) determining respective mutation frequencies of base pair mutation patterns in a control group by the same procedures as in the steps (1) to (6); and
(8) subtracting the respective mutation frequencies of the mutation patterns in the control group obtained in the step (7) from the respective mutation frequencies of the mutation patterns in the test group obtained in the step (6).
[28] The method according to [27], wherein preferably,

[0143] the method is a method for evaluating mutations in cancer cells, wherein the control group is a non-cancer cell population, or

[0144] the test group is a population of cells suspected of having cancer or cells to be evaluated for the risk of cancerization, the control group is a non-cancer cell population or a population of cells with a low risk of cancerization, and the risk of cancerization in the cells is evaluated by the method.

[29] The method according to [27], wherein preferably, the method is a method for evaluating genetic information in cultured cells, wherein the control group is a population of cells which are cultured cells of the same type as in the test group and have known genetic information.
[30] A method for evaluating mutations in cancer cells, comprising:
(1′) obtaining DNAs from a test group, the test group is a cancer cell population;
(2′) sequencing fragments of the DNAs to obtain one or more read sequences per fragment;
(3′) comparing each of the one or more read sequences with a reference sequence to detect sites of mismatch bases between the each read sequence and the reference sequence, wherein the reference sequence is a known sequence in the DNAs;
(4′) obtaining the sites detected in the step (3′) as sites of mutation each having a base pair substitution mutation;
(5′) as to each of the mutations thus obtained, determining a context sequence comprising a base before mutation and adjacent upstream and downstream bases of the base before mutation, the context sequence is determined on the basis of the reference sequence;
(6′) typing each of the mutations obtained in the step (4′) according to the context sequence determined in the step (5′) and the type of the base after mutation; and
(7′) determining respective mutation frequencies of the mutation types obtained in the step (6′).
[31] A method for evaluating genetic information in cultured cells, comprising:
(1′) obtaining DNAs from a test group, the test group is a cultured cell population;
(2′) sequencing fragments of the DNAs to obtain one or more read sequences per fragment;
(3′) comparing each of the one or more read sequences with a reference sequence to detect sites of mismatch bases between the each read sequence and the reference sequence, wherein the reference sequence is a known sequence in the DNAs;
(4′) obtaining the sites detected in the step (3′) as sites of mutation each having a base pair substitution mutation;
(5′) as to each of the mutations thus obtained, determining a context sequence comprising a base before mutation and adjacent upstream and downstream bases of the base before mutation, the context sequence is determined on the basis of the reference sequence;
(6′) typing each of the mutations obtained in the step (4′) according to the context sequence determined in the step (5′) and the type of the base after mutation; and
(7′) determining respective mutation frequencies of the mutation types obtained in the step (6′).
[32] The method according to [30] or [31], preferably, further comprising

[0145] extracting, from the bases of the read sequences obtained in the step (2′), bases with high reading reliability of the sequencing, wherein

[0146] the step (3′) comprises comparing the extracted bases on the read sequences with the bases of the reference sequence.

[33] The method according to [30] or [31], preferably, further comprising extracting bases with high reading reliability of the sequencing among the bases of the sites detected by the comparison of the read sequences with the reference sequence in the step (3′).
[34] The method according to any one of [30] to [33], wherein preferably, the steps (3′) to (6′) comprise:

[0147] dividing bases contained in the read sequences into the following bases (i) to (iv):
[0148] (i) a base located at a position where the base on the reference sequence is A,
[0149] (ii) a base located at a position where the base on the reference sequence is T,
[0150] (iii) a base located at a position where the base on the reference sequence is G, and
[0151] (iv) a base located at a position where the base on the reference sequence is C;

[0152] detecting mismatch bases with respect to the reference sequence from among the bases contained in the read sequences, and obtaining sites of the detected bases as sites of mutation each having a base pair substitution mutation;

[0153] obtaining base pairs before mutation and after mutation at the respective sites of mutation of the detected base mismatch;

[0154] classifying the base pair substitution mutations at the sites of mutation, according to the types of the base pairs before mutation and the base pairs after mutation, into 6 of base pair mutation patterns: AT→TA, AT→CG, AT→GC, GC→TA, GC→CG, and GC→AT;

[0155] determining context sequences each consisting of a base before mutation located at each of the sites of mutation, one or more adjacent upstream bases of the base before mutation, and one or more adjacent downstream bases of the base before mutation; and

[0156] typing each of the base pair substitution mutations according to the 6 of base pair mutation patterns and the context sequences.

[35] The method according to [34], wherein preferably, the context sequence is a sequence of 3 bases long including the base before mutation at the mutation site and adjacent bases one upstream and one downstream thereof, and the base pair substitution mutations are typed into 96 groups according to the 6 base pair mutation patterns and the context sequences of 3 bases long.
[36] The method according to any one of [30] to [35], preferably, further comprising:
(8′) determining respective mutation frequencies of mutation types in a control group by the same procedures as in the steps (1′) to (7′); and
(9′) subtracting the respective mutation frequencies of the mutation types in the control group obtained in the step (8′) from the respective mutation frequencies of the mutation types in the test group obtained in the step (7′).
[37] The method according to [36], wherein preferably,

[0157] the method is a method for evaluating mutations in cancer cells, wherein the control group is a non-cancer cell population, or

[0158] the test group is a population of cells suspected of having cancer or cells to be evaluated for the risk of cancerization, the control group is a non-cancer cell population or a population of cells with a low risk of cancerization, and the risk of cancerization in the cells is evaluated by the method.

[38] The method according to [36], wherein preferably, the method is a method for evaluating genetic information in cultured cells, wherein the control group is a population of cells which are cultured cells of the same type as in the test group and have known genetic information.
[39] A method for evaluating mutations in cancer cells, comprising:
(1″) obtaining DNAs from a test group, the test group is a cancer cell population;
(2″) sequencing fragments of the DNAs to obtain one or more read sequences per fragment;
(3″) comparing each of the one or more read sequences with a reference sequence to detect sites of base insertion or deletion in the each read sequence with respect to the reference sequence, wherein the reference sequence is a known sequence in the DNAs;
(4″) obtaining the sites detected in the step (3″) as sites of mutation each having an insertion or deletion mutation;
(5″) as to each of the mutations thus obtained, determining the base length of the insertion or deletion and/or the type of the inserted or deleted base; and
(6″) determining respective mutation frequencies for each of the sites of the insertion or deletion mutations with different base lengths of the insertion or deletion and/or different types of the inserted or deleted bases determined in the step (5″).
[40] A method for evaluating genetic information in cultured cells, comprising:
(1″) obtaining DNAs from a test group, the test group is a cultured cell population;
(2″) sequencing fragments of the DNAs to obtain one or more read sequences per fragment;
(3″) comparing each of the one or more read sequences with a reference sequence to detect sites of base insertion or deletion in the each read sequence with respect to the reference sequence, wherein the reference sequence is a known sequence in the DNAs;
(4″) obtaining the sites detected in the step (3″) as sites of mutation each having an insertion or deletion mutation;
(5″) as to each of the mutations thus obtained, determining the base length of the insertion or deletion and/or the type of the inserted or deleted base; and
(6″) determining respective mutation frequencies for each of the sites of the insertion or deletion mutations with different base lengths of the insertion or deletion and/or different types of the inserted or deleted bases determined in the step (5″).
[41] The method according to [39] or [40], preferably, further comprising

[0159] extracting, from the bases of the read sequences obtained in the step (2″), bases with high reading reliability of the sequencing, wherein

[0160] the step (3″) comprises comparing the extracted bases on the read sequences with the bases of the reference sequence.

[42] The method according to [39] or [40], preferably, further comprising extracting bases with high reading reliability of the sequencing among the bases of the sites detected by the comparison of the read sequences with the reference sequence in the step (3″).
[43] The method according to any one of [39] to [42], wherein the base length of the insertion or deletion site to be detected is preferably 10 bp or less, more preferably 1 to 5 bp.
[44] The method according to any one of [39] to [43] preferably, further comprising:
(7″) determining respective mutation frequencies for each of sites of the insertion or deletion mutations with different base lengths of the insertion or deletion and/or different types of the inserted or deleted bases in a control group by the same procedures as in the steps (1″) to (6″); and
(8″) subtracting the respective mutation frequencies in the control group obtained in the step (7″) from the respective mutation frequencies for each of the sites of the insertion or deletion mutations with different base lengths of the insertion or deletion and/or different types of the inserted or deleted bases in the test group obtained in the step (6″).
[45] The method according to [44], wherein preferably,

[0161] the method is a method for evaluating mutations in cancer cells, wherein the control group is a non-cancer cell population, or

[0162] the test group is a population of cells suspected of having cancer or cells to be evaluated for the risk of cancerization, the control group is a non-cancer cell population or a population of cells with a low risk of cancerization, and the risk of cancerization in the cells is evaluated by the method.

[46] The method according to [44], wherein preferably, the method is a method for evaluating genetic information in cultured cells, wherein the control group is a population of cells which are cultured cells of the same type as in the test group and have known genetic information.
[47] The method according to any one of [21] to [38], wherein preferably, the base pair substitution mutation is a one-base pair substitution mutation, a two-base pair substitution mutation, or a three-base pair substitution mutation.
[48] The method according to any one of [1] to [47], wherein a total amount of the read sequences used in the detection is preferably 1×10¹⁰ bp or less, more preferably 1×10⁹ bp or less, even more preferably 1×10⁸ bp or less, even more preferably 1×10⁷ bp or less, even more preferably 1×10⁶ bp or less.

### EXAMPLES

[0163] Hereinafter, the present invention will be described more specifically with reference to Examples.

### Example 1 Validation of Analysis Method

[0164] In this Example, the analysis method of the present invention was validated by analyzing synthetic DNA samples having known mutation frequencies by the test method of the present invention to qualitatively and quantitatively evaluate the mutations.

### 1. Preparation of DNA Sample

[0165] Synthetic DNA samples containing various mutation patterns in known amounts were prepared. Schematic diagram 1 shows a conceptual diagram of procedures of preparing the DNA samples. A synthetic DNA sequence having a 1000-bp random sequence (SEQ ID NO: 1; hereinafter, referred to as a random DNA sequence) was synthesized. This random DNA sequence contained approximately 50% each of GC and AT base pairs. On the basis of this random DNA sequence, DNA sequences harboring a mutation (base pair substitution mutation or short insertion or deletion mutation) (hereinafter, referred to as mutated DNA sequences) were prepared. Hereinafter, the details will be described.

[0166] For the mutated DNA sequences containing a base pair substitution mutation, 3 types of mutated sequences were prepared by substituting a GC base pair located at the center (position 501) of the random DNA sequence by a different base pair (GC→TA, CG or AT; see Table 1) and were each integrated into a pTAKN-2 vector. The obtained vectors were each dissolved in a TE buffer (pH 8.0, manufactured by Wako Pure Chemical Industries, Ltd.) and adjusted to a concentration of 100 ng/μL. The solutions containing the 3 types of mutated DNA sequences were mixed in equal amounts. Likewise, 3 types of mutated sequences were prepared by substituting an AT base pair (position 502) by a different base pair (AT→TA, CG or GC; see Table 1) and each integrated into a pTAKN-2 vector. TE buffer solutions (100 ng/μL) of the vectors were prepared, and 3 types of solutions thus obtained were mixed in equal amounts. Each mixed solution of equal amounts was used as a mutated DNA solution. Also, 10 μL of the mutated DNA solution was mixed with 90 μL of a TE buffer to prepare a 10-fold diluted mutated DNA solution. Further, 10 μL of the 10-fold diluted mutated DNA solution was mixed with 90 μL of a TE buffer to prepare a 100-fold diluted mutated DNA solution. Aside from these, the random DNA sequence was integrated into a pTAKN-2 vector, and a TE buffer solution (100 ng/μL) of the vector was prepared (random DNA solution). The random DNA solution was mixed with the mutated DNA solution, the 10-fold diluted mutated DNA solution, or the 100-fold diluted mutated DNA solution to prepare a DNA sample in which the substitutions of each base pair were found with equal frequencies and the total mutation frequency was 1/10³, 1/10⁴, 1/10⁵, or 1/10⁶ bp (see Table 2).

[0167] For the mutated DNA sequences containing a short insertion or deletion mutation, a mutated sequence was prepared by inserting one base (A, i.e., AT base pair) before the base pair at position 501 (see Table 1). In the same way as above, this sequence was integrated into a pTAKN-2 vector, and a TE buffer solution (100 ng/μL) of the vector was prepared and used as a mutated DNA solution. Also, 10-fold and 100-fold diluted mutated DNA solutions of the mutated sample solution were prepared. The random DNA solution was mixed with the mutated DNA solution, the 10-fold diluted mutated DNA solution, or the 100-fold diluted mutated DNA solution to prepare a DNA sample in which the total mutation frequency was 1/10³, 1/10⁴, 1/10⁵, or 1/10⁶ bp (see Table 2). The DNA sample containing each mutated DNA solution was used as a mutated sample, while a DNA sample free from the mutated DNA solution (consisting of the random DNA solution alone) was used as a control sample to conduct the following sequencing. Schematic diagram 1, entitled “Procedures of preparing DNA sample,” is shown on FIG. 9.

TABLE 1
1. Base pair substitution mutation

| | | | Transition |
|---|---|---|---|
| | Transversion | | (purine⇔purine or |
| | (purine⇔pyrimidine) | | pyrimidine⇔pyrimidine) |
| GC | GC > TA | GC > CG | GC > AT |
| AT | AT > TA | AT > CG | AT > GC |

2. Short insertion or deletion mutation
TTCTGAT > TTCT-A-GAT

TABLE 2
Ratio of mutated DNA solution and total mutation frequency
in DNA sample

| | Total mutation frequency (/bp) | | | | |
|---|---|---|---|---|---|
| | 1/10³ | 1/10⁴ | 1/10⁵ | 1/10⁶ | 0 |
| Amount of random DNA solution | — | 81 μL | 89 μL | 90 μL | 90 μL |
| Amount of mutated DNA solution | 90 μL | 9 μL | — | — | — |
| (base pair substitution mutation or | | | | | |
| short insertion or deletion mutation) | | | | | |
| Amount of 10-fold diluted mutated | — | — | 9 μL | — | — |
| DNA solution | | | | | |
| Amount of 100-fold diluted mutated | — | — | — | 9 μL | — |
| DNA solution | | | | | |
| Ratio of mutated DNA solution | 100% | 10% | 1% | 0.1% | 0% |

### 2. High-Throughput Sequencing

[0168] Each mutated sample and control sample prepared in the paragraph 1. were sequenced using a next-generation sequencer HiSeq 2500 (manufactured by, Illumina, Inc.; hereinafter, also referred to as HiSeq) according to the standard protocol. In this operation, DNA was fragmented into an average length of approximately 150 bp by ultrasonic treatment. Adaptors were added to both ends of each fragment. The fragments were sequenced at a read length of 2×125 bp. 1.9-Gbp nucleotide sequence information per sample was obtained on average.

### 3. Editing of Read Sequence and Preparation of Format for Mutation Analysis

[0169] Schematic diagram 2 shows a conceptual diagram of the editing and analysis flows of the read sequences obtained by the sequencing. First, the removal of the adaptor sequences at the ends of each read and the removal of bases with low quality were conducted using Cutadapt software (Martin, 2011).

[0170] i) In HiSeq, per DNA fragment (original fragment) subjected to the sequencing, a read 1 sequence is read from one side, and then, a read 2 sequence to be paired therewith is obtained from the opposite side of the fragment. Accordingly, each pair of read sequences selected by Cutadapt was constructed into one conjugated read using PEAR software by merging both the read sequences with each other at a part where the sequences are equivalent. All the bases in the sequence of the conjugated read were standardized to read 1. As the quality value of each base in the conjugated read, the sum of the quality values of the bases of read 1 and read 2 was adopted when the bases of read 1 and read 2 were complementary, whereas a value obtained by subtracting a smaller quality value from a larger quality value was adopted when the bases of read 1 and read 2 were not complementary. This procedure allows to select among the bases in the conjugated reads, bases of base pairs complementary between reads 1 and 2 according to the difference in quality value.

[0171] ii) The conjugated read of each prepared original fragment was mapped to a reference sequence (pTAKN-2 vector sequence having an insert of the random DNA sequence) using Bowtie 2 software to create a file of Sam format.

[0172] iii) The obtained Sam file was converted to a pileup format using Samtools software. In this operation, on the basis of the quality values of the bases, the scope of base information to be analyzed was restricted to the bases of the base pairs complementary between both reads in the merged regions of the pair reads.

[0173] iv) The obtained pileup format was subjected to mutation analysis using a program created using a programming language Python.

Schematic diagram 2, entitled “Editing and analysis flows of read sequence,” is shown on FIG. 10A-FIG. 10D.

### 4. Mutation Analysis

### 1) Detection of Base Pair Substitution Mutation

[0174] Schematic diagram 3 shows a conceptual diagram of a mutation analysis algorithm for the one-base pair substitution mutation. From the pileup format subjected to the analysis, all the bases to be analyzed in the read sequences were classified, using a program created using a programming language Python, into 4 groups: a group in which the corresponding base in the reference sequence was A; a group in which the corresponding base in the reference sequence was T; a group in which the corresponding base in the reference sequence was G; and a group in which the corresponding base in the reference sequence was C. Subsequently, the total number of bases assigned to each group and mutated bases were detected. From the obtained data, the mutation call ratio of each mutation pattern of an AT base pair (AT→TA, AT→CG, and AT→GC) to 10⁶ bp of the AT base pair before the mutation and the mutation call ratio of each mutation pattern of a GC base pair (GC→TA, GC→CG, and GC→AT) to 10⁶ bp of the GC base pair before the mutation were calculated.

Schematic diagram 3, entitled “Mutation analysis algorithm for base pair substitution” is shown as FIG. 11.

[0175] FIG. 1A and FIG. 1B show the respective mutation call ratio of the mutation patterns of each of GC and AT base pairs in the mutated samples containing a base pair substitution mutation. For all the mutation patterns, the mutation call ratios were elevated depending on the mutation frequencies in the samples. Mutations were also detected in the control samples, but which indicate background errors (errors generated in the process from sample preparation to sequencing, including a sequencing error). Furthermore, the mutation call ratios also differed among the mutation patterns in the control samples, and the GC base pair tended to exhibit a higher mutation call ratio as compared with the AT base pair. This is probably because the GC base pair is susceptible to chemical modification such as oxidation, in the process of library preparation such as DNA extraction.

### 2) Calculation of Increased Mutation Frequency

[0176] Next, the background errors including a sequencing error were excluded by subtracting the mutation call ratios of the control samples from the mutation call ratios of the mutated samples to calculate the amounts of mutation frequencies increased in the mutated samples with respect to the control samples (hereinafter, referred to as increased mutation frequencies). The calculated increased mutation frequencies are shown in FIG. 2A and FIG. 2B. For all the mutation patterns, the increased mutation frequencies were roughly consistent with the frequencies of the introduced mutations, demonstrating that a base pair substitution mutation with a frequency of one in every approximately 10⁵ bp was able to be detected by the method of the present invention.

### 3) Detection of Short Insertion or Deletion Mutation

[0177] For the short insertion or deletion mutation, all the bases inserted or deleted at a length of 10 bp or less to the random DNA sequence were detected, and an appearance frequency was measured for each of the lengths of the insertions or deletions (bp) and each of the types of the inserted or deleted bases using a program created using a programming language Python. In the same way as in the base pair substitution mutation analysis mentioned above, background errors were excluded by subtracting the mutation frequencies of the control sample to calculate increased mutation frequencies. The results about the increased mutation frequencies of the insertion mutation are shown in FIG. 3A and FIG. 3B. FIG. 3A shows increased mutation frequencies as to the length of the inserted base (bp), and FIG. 3B shows increased mutation frequencies as to the type of the inserted base. A short insertion mutation with a frequency of one in every approximately 10⁵ bp was able to be detected by the method of the present invention. Also, a one-base deletion was studied in the same way as in the insertion mutation. As a result, a short deletion mutation with a frequency of one in every approximately 10⁵ bp was able to be detected (data not shown).

### 5. Conclusion

[0178] In this Example, comprehensive mutation information including quantity (frequency) and quality (mutation pattern) was able to be obtained highly sensitively as to a base pair substitution mutation and a short insertion or deletion mutation in DNA containing various pieces of mutation information. These results demonstrated that a low-frequency mutation present in DNA can be analyzed qualitatively and quantitatively by the analysis method of the present invention.

### Example 2 Analysis of Genotoxicity of Mutagen

[0179] In this Example, the genotoxicity of a mutagen was analyzed by qualitatively and quantitatively analyzing mutation patterns in the genome of an organism exposed to the mutagen according to the analysis method of the present invention. The mutagen used was ethylnitrosourea (ENU, CAS No. 759-73-9). A Salmonella TA100 strain which is available for detection of a base pair substitution mutation and is routinely used in the Ames test was used as the organism to be exposed to the mutagen. The experiment was conducted in 3 independent operations to prepare samples (n=3).

### 1. Exposure of TA100 Strain to Mutagen

[0180] The exposure to the mutagen was carried out in conformity to the preincubation method of the Ames test (K. Mortelmans et al., Mutat. Res. —Fundam. Mol. Mech. Mutagen., 2000, 455, 29-60). TA100 strain was inoculated to 2 mL of Nutrient Broth No. 2 (manufactured by Oxoid Ltd.) and shake-cultured at 37° C. at 180 rpm for 4 hours to obtain a preculture solution having an O.D. 660 value of 1.0 or more. ENU (54%; manufactured by Sigma-Aldrich Co. LLC) was diluted with dimethyl sulfoxide (DMSO; manufactured by Wako Pure Chemical Industries, Ltd.). One hundred μL of the ENU solution diluted into an appropriate concentration, 500 μL of a 0.1 M phosphate buffer, and 100 μL of the preculture solution were added into a test tube (ENU concentration: 67.5, 135, 270, 405, 540, 810, and 1080 μg/tube), and shake-cultured at 100 rpm for 20 minutes in a water bath of 37° C. For a control group, 100 μL of a solvent (DMSO) was added instead of the ENU solution. After the shake culture for 20 minutes, the test tube containing the culture solution was taken out of the water bath. Fifty μL of the culture solution was added to 2 mL of a nutrient broth solution dispensed in advance, and additionally cultured at 37° C. at 180 rpm for 14 hours. Then, 1 mL of the bacterial suspension was recovered and centrifuged at 7,500 rpm for 5 minutes. The supernatant was removed to recover bacterial cells.

[0181] For the Ames test, a bacterial suspension exposed to ENU under the same conditions as above was also prepared. Two mL of top agar (containing 1% NaCl, 1% agar, 0.05 mM histidine and 0.05 mM biotin) warmed to 45° C. was added thereto, and the bacterial cells were suspended by vortex. Then, the suspension was layered over a minimal glucose agar medium (Tesmedia (Registered trademark) AN; manufactured by Oriental Yeast Co., Ltd.). The obtained plate was cultured at 37° C. for 48 hours. Then, observed colonies were counted.

### 2. Recovery of Total DNA

[0182] From the bacterial cells obtained in the paragraph 1., total DNA was recovered using DNeasy Blood & Tissue Kit (manufactured by Qiagen N.V.) according to the recommended protocol.

### 3. High-Throughput Sequencing

[0183] The total DNA solutions recovered in the paragraph 2. from the control group and the ENU treatment groups were sequenced using a next-generation sequencer HiSeq 2500 (manufactured by Illumina, Inc.) according to the standard protocol. In this operation, DNA was fragmented into an average length of approximately 150 bp by ultrasonic treatment. Adaptors were added to both ends of each fragment. The fragments were sequenced at a read length of 2×125 bp. 5.0-Gbp nucleotide sequence information per sample was obtained on average.

### 4. Editing of Read Sequence and Mutation Analysis

[0184] The editing of read sequences obtained by the sequencing and mutation analysis were conducted using Cutadapt software, PEAR software, Bowtie 2 software, Samtools software, and a program created using a programming language Python according to the conceptual diagram of analysis flow shown in Schematic diagram 2 in the same way as in Example 1. In this Example, PCR duplicates were removed using Picard tools (broadinstitute.github.io/picard/) after mapping using the Bowtie 2 software.

[0185] A reference sequence for the mapping using the Bowtie 2 software was constructed on the basis of the genomic sequence of the S. typhimurium TA100 strain. First, DNA was extracted from the TA100 strain and sequenced using a next-generation sequencer HiSeq 2500 (manufactured by Illumina, Inc.) according to the standard protocol. In this operation, the DNA was fragmented into an average length of approximately 300 bp by ultrasonic treatment. Adaptors were added to both ends of each fragment. The fragments were sequenced at a read length of 2×125 bp. The obtained read sequences were mapped to the genomic sequence of a S. typhimurium LT-2 strain, a pSLT plasmid sequence (GCA000006945.2), and a R46 plasmid sequence (NC_003292.1), followed by mutation detection using Samtools software. A reference sequence based on the thus-obtained genomic sequence of the TA100 strain reflecting the mutation information was prepared and used in the mutation analysis. The genomic sequence of the TA100 strain is shown in SEQ ID NO: 2.

### 5. Calculation of Increased Mutation Frequency

[0186] By the same procedures as in Example 1, all the bases to be analyzed in all the read sequences mapped to the reference sequence were assigned, using a program created using a programming language Python, to 4 groups according to corresponding bases in the reference sequence. Subsequently, the total number of bases in each group and mutated bases with respect to the reference sequence were detected. Each mutation pattern (AT→TA, AT→CG, and AT→GC; and GC→TA, GC→CG, and GC→AT) in 10⁶ bp of the AT base pair or the GC base pair in the bases to be analyzed, and the mutation call ratio of each mutation pattern were calculated as to each of the ENU treatment groups and the control group by comparing the mutated bases with the bases of the reference sequence. Statistical study of the frequency of each mutation pattern between the control group and the ENU treatment groups was conducted for each mutation pattern by the Dunnett's multiple comparison test.

[0187] Subsequently, increased mutation frequencies due to exposure to ENU were calculated by subtracting the mutation call ratio of the control group from the mutation call ratio of the ENU treatment group for each base pair mutation pattern by the same procedures as in the paragraph 2) of Example 1.

### 6. Sequence Context Analysis

[0188] In this study, mutation call ratios were analyzed on the basis of a sequence context. Specifically, the mutation types of base pairs at the respective locations of the mutation calls were detected on the basis of the mutation call information and the reference sequence information obtained in the paragraph 5. Further, information on 3 bases including a base at the location of each mutation call ant both of its adjacent bases was collected on the basis of the reference sequence information. The mutation at the location of each mutation call was classified into 96 types according to the 6 base pair mutation types and information on both the adjacent bases (4×4=16). A mutation call ratio (/10⁶ bp) was calculated for each of the 96 mutation types based on this sequence context. Increased mutation frequencies due to exposure to ENU were calculated by subtracting the mutation call ratio of the control group from the mutation call ratio of the ENU treatment group for each mutation type.

### 7. Results

### 1) The Number of Revertants of Ames Test

[0189] Table 3 shows the number of revertant colonies after exposure to ENU. The data was indicated by a mean and standard deviation of measurement values from 3 plates. Increase in the number of revertants was found by the exposure to ENU, demonstrating that mutations were introduced into the genome of the TA100 strain by the exposure to ENU.

TABLE 3

| ENU | |
|---|---|
| concentration | The number |
| (μg/plate) | of revertants |
| 0 (DMSO) | 110 ± 10.0 |
| 67.5 | 258 ± 2.5 |
| 135 | 659 ± 113.9 |
| 270 | 3320 ± 734.4 |
| 405 | 4994 ± 455.6 |
| 540 | 5051 ± 173.0 |
| 810* | 3102 ± 883.0 |
| 1080* | 503 ± 190.9 |

*Growth inhibition of the strain was found on plate.

### 2) Calculation of Change in Mutation Call Ratio by Exposure to ENU

[0190] FIG. 4A and FIG. 4B show the increased mutation frequencies calculated in the paragraph 5. as to the ENU treatment groups (ENU concentration: 135, 270, 405 and 540 μg/tube). Increase was found in the frequencies of a plurality of base pair mutation patterns by the exposure to ENU. For the GC base pair, increase in the frequency of GC>AT mutation was found (FIG. 4A). On the other hand, for the AT base pair, increase in the frequencies of AT>TA and AT>GC mutations was mainly found (FIG. 4B).

### 3) Classification of Each Mutation Pattern According to Original Base

[0191] In HiSeq, the sequence of read 1 corresponds to the original DNA fragment (original fragment) subjected to sequencing reaction. Thus, examining bases among A, T, G and C in the reference sequence on which the bases of read 1 sequences are mapped leads to elucidate a base before the mutation (i.e., an original base) at the location of a mutation in the original fragment.

[0192] Since a background error frequency can differ depending on original bases, the mutation patterns were further classified according to original bases, and the increased mutation frequency of each class was determined. Specifically, each of the 6 base pair mutation patterns in the control sample and the mutated samples determined in the paragraph 5. was further classified into 2 groups according to the types of the original bases, and the mutation frequency of each class was determined. Subsequently, increased mutation frequencies were calculated by subtracting the corresponding mutation frequency of the control sample from the mutation frequency of the mutated sample.

[0193] FIG. 5 shows the increased mutation frequencies of the base pair mutation patterns divided according to the types of the original bases in the ENU-exposed samples. Normally, increase in mutation frequency is equivalent in both bases constituting the base pair since both bases of a base pair were altered in the mutation fixed in the genome by exposure to ENU. However, in the GC>TA mutation shown in FIG. 5, the tendency of an evidently higher mutation frequency was found for the original base G as compared with the original base C.

[0194] The bias described above strongly suggests that a great majority of GC>TA mutations were caused by chemically modified G. It was thus considered that increase in the frequency of GC>TA mutation found in this study reflected a reading error of a chemically modified G base in sequencing, not the mutation fixed in the genome. It is known that the G base is susceptible to chemical modification by oxidation in the process of DNA sample preparation and is prone to errors to misread G as T in sequencing. Thus, the increase in GC>TA mutation frequency found in some samples in this study seemed to be artificial influence due to the oxidation of G in the process of DNA preparation. These results suggested that a sequencing error caused by an error in the process of DNA sample preparation from cells can be removed by the analysis method of the present invention.

### 4) Spectral Analysis of Mutation

[0195] Next, mutation spectra were analyzed on the basis of the increased mutation frequency of each mutation pattern found to be increased in the ENU 540 μg/tube group. Specifically, the increased mutation frequencies of the mutation patterns in 10⁶ bp were summed, and the ratio of each mutation pattern to the whole was calculated. The results are shown in FIG. 6 and Table 4. A mutation pattern found to have the largest increase in frequency was GC>AT mutation, and a mutation pattern having the second highest ratio was AT>GC mutation. This was similar to results about mutation patterns induced by ENU found in a YG7108 strain, a bacterial strain of the Ames test, in Non Patent Literature 5, suggesting that mutation patterns induced by ENU were able to be accurately detected by the method of the present invention.

TABLE 4

| Base pair | |
|---|---|
| substitution | % |
| GC > AT | 73.7 |
| AT > GC | 12.4 |
| AT > TA | 11.5 |
| AT > CG | 2.36 |

### 5) Sequence Context Analysis

[0196] FIG. 7 and FIG. 8 show increased mutation frequencies calculated by sequence context analysis. Each mutation pattern in the drawings is indicated by the mutation pattern of a pyrimidine base (C>A, C>G, C>T, T>A, T>C and T>G) among mutated base pairs, and a 3-base sequence including the pyrimidine base and both of its adjacent bases (e.g., the C>T wherein the C base flanked by A and T is indicated by ACT). In this analysis, for C>T mutation, which has the largest increase in mutation frequency, the tendency of larger increase in mutation frequency was found in a context with a pyrimidine base (C or T) located at 3′ side to the C. This was similar to the patterns shown in the mutation signature by an alkylating agent (Signature 11 in FIG. 7 and FIG. 8; see Nature, 2013, 500 (7463): 415-421). These results were not contradictory to the fact that ENU is an alkylating agent. These results suggest that sequence context analysis is a useful method which can predict a mechanism underlying the genotoxicity of a mutagen or conveniently predict a role of the mutagen in carcinogenesis in humans.

The application's sequence listing, which the Patent Office published only in electronic form, follows.

SEQUENCE LISTING (2 sequences)

SEQ ID NO: 1 - DNA, 1000 bp, Artificial Sequence
  random sequence
aaaataggaccgaggagtatgcattcttagcgttaccctggcgggattgttgccgaaataggctaatagaaccagagatgtcaggtacaacagggagttcggctcccagtcaggcttggctccccacatgatgtgaacgtctgagcaaagtaataaaacatcgcgaggattgtcccaacgtccgaccgagacgtgcatggagtttgtgcgtcgatgcactaatgtttaggcttcaactaccagaaagacaacactgtgtaccccctaagcaaatgctgagtatgcttcacatgttgaaagagtgcgttaaatgttaagaagagcaaaaatcgcatgccgcggtagatatcatactaacaagtcgtggcgatacaggtgtacattagtctaaccgatgaacaaggaaatttaatccgtctacggccttaggttcatcgtttgttcggtgcagcttttcaatacagaatggtcgctgcctgccattatttgtgagtcgttctgatgcctttgtttgtacgtatttatcacgctgttaacggtttgctgtcgtcgaaactgctacgatctcgacgacctctgttatcagtatggcccttggccacggcagcatatctgtttttaggtttagtcgagtggcgcaacgaaaactgctcggattcttgccgactagctggatccaaagctagcttgtagatacctaggtccgtccagcgtacaagcctagcggtgtcgagcctatacgcactcactgggctgtccatgcatcctgaccttcttgcacttgttaatgtagaaggtggccaaggggaggcccacccgcggctgacggtcgtgactatgggtgggggcgtgtagctggccacaagtgaagcggcgggagcactaatgggcgcgtgccacaaaacttagccgtaaccaagtacgctgtataactcacgtaaaaggccagcgcttggacatggacccgtgtcgggatcacgccgtaaagctatccttgcaa

SEQ ID NO: 2 - DNA, 4857450 bp, Salmonella typhimurium (residues 1-1,619,150 of 4,857,450)
agagattacgtctggttgcaagagatcatgacagggggaattggttgaaaataaatatatcgccagcagcacatgaacaagtttcggaatgtgatcaatttaaaaatttattgacttaggcgggcagatactttaaccaatataggaatacaagacagacaaataaaaatgacagagtacacaacatccatgaaccgcatcagcaccaccaccattaccaccatcaccattaccacaggtaacggtgcgggctgacgcgtacaggaaacacagaaaaaagcccgcacctgaacagtgcgggcttttttttcgaccagagatcacgaggtaacaaccatgcgagtgttgaagttcggcggtacatcagtggcaaatgcagaacgttttctgcgtgttgccgatattctggaaagcaatgccaggcaagggcaggtagcgaccgtactttccgcccccgcgaaaattaccaaccatctggtggcaatgattgaaaaaactatcggcggccaggatgctttgccgaatatcagcgatgcagaacgtattttttctgacctgctcgcaggacttgccagcgcgcagccgggattcccgcttgcacggttgaaaatggttgtcgaacaagaattcgctcagatcaaacatgttctgcatggtatcagcctgctgggtcagtgcccggatagcatcaacgccgcgctgatttgccgtggcgaaaaaatgtcgatcgcgattatggcgggacttctggaggcgcgtgggcatcgcgtcacggtgatcgatccggtagaaaaattgctggcggtgggccattaccttgaatctaccgttgatatcgcggaatcgactcgccgtatcgccgccagccagatcccggccgatcacatgatcctgatggcgggctttaccgccggtaatgaaaagggtgaactggtggtgctgggccgtaatggttccgactattccgccgccgtgctggccgcctgtttacgcgctgactgctgtgaaatctggactgacgtcgatggcgtgtatacctgtgacccgcgccaggtgccggacgccaggctgctgaaatcgatgtcctaccaggaagcgatggaactctcttacttcggcgccaaagtccttcaccctcgcaccattacgcccatcgcccagttccagatcccctgtctgattaaaaataccggtaatccgcaggcgccaggaacgctgatcggcgcgtccagcgacgatgataacctgccggttaaagggatctctaaccttaacaacatggcgatgtttagcgtctccggcccgggaatgaaagggatgattgggatggcggcgcgtgttttcgccgccatgtctcgcgccgggatctcggtggtgctcattacccagtcctcctctgagtacagcatcagtttctgtgtgccgcagagtgactgcgcgcgtgcccgccgtgcgatgcaggatgagttctatctggagctgaaagaggggctgctggagccgctggcggttacggagcggttggcgattatctctgttgtcggcgacggtatgcgcacgctacgcggcatttcagcgaaattcttcgccgcgctggcgcgggctaatatcaatatcgtggcgatcgctcagggatcttctgagcgttctatttctgtggtggtgaataacgacgatgccaccaccggcgtgcgggtaacgcaccagatgctgttcaataccgatcaggtgattgaagtgtttgtcattggcgtcggcggcgtcggcggcgcgctactggaacagcttaaacgtcagcaaacctggctgaagaacaagcacatcgatctacgcgtgtgcggcgtggcgaactcaaaggcgttgctaaccaatgtgcatggcctgaatctggacaactggcaggcggaactggcgcaagcgaacgcgccgttcaatctgggacgcttaattcgcctggtgaaagaatatcatctactcaatccggtgattgttgattgtacctccagtcaggcggtggccgaccagtatgccgacttcctgcgtgaagggttccatgtggtgacgccaaacaagaaagcgaacacctcgtcaatggactactaccatcagctacgtttcgccgccgcgcaatcacggcgcaaattcttgtatgacaccaacgtcggcgccggtttgccggtaatcgaaaacctgcaaaacctgctgaatgccggtgatgaactgcaaaaattttccggcattctttccgggtcgctctcttttattttcggtaaactggaagaggggatgagtctctcacaggcgaccgccctggcgcgcgagatgggctataccgaacccgatccgcgcgacgatctttccggtatggatgtggcgcgtaaactgttgatcctcgcccgcgagacgggccgcgagctggagctttccgatattgtgattgaaccggtgttgccgaacgagtttgacgcctccggcgatgtgaccgcctttatggcacatctgccgcagcttgacgacgcgtttgccgcccgtgtggcgaaagctcgtgatgaaggtaaggtattgcgctatgtgggcaatatcgaagaggatggcgtgtgccgcgtgaaaattgccgaagttgatggtaacgatccgctcttcaaagtgaaaaacggtgaaaacgcgctggcgttctacagccactattatcagcccttgccgttggtgctgcgcggctacggcgcaggcaatgatgtgacggcggcgggcgtgtttgccgatctgttacggaccctctcatggaagttaggagtttaacatggtgaaagtgtatgccccggcttccagcgcgaacatgagcgtcggtttcgacgtgttgggcgcagccgtcacacccgttgacggcacgttgctgggcgatgtggtatccgttgaagcagcggaccatttccgtctgcataacctggggcgatttgccgataaactgccgccggagccgcgtgaaaatattgtttatcagtgctgggaacgtttttgccaggcattggggaaaaccatcccggtggcgatgacgctggaaaaaaatatgccgattggttccgggttagggtccagcgcctgttccgtcgtcgccgcgctggtcgcgatgaatgagcactgcggcaaaccgttaaacgacacgcgtctgttggcgctgatgggcgagctggaaggccgtatctccggcagcatccattacgataacgtcgcgccgtgctttcttggcggtatgcagttgatgattgaagaaaacggcattattagtcagcaggtgccgggctttgatgagtggctatgggtactggcttatccgggcattaaagtttctaccgcagaagcacgggccattttgcctgcgcagtatcgccgtcaggattgcattgcgcatggacggcatctggccggttttattcacgcctgttactcgcggcagccgcagcttgccgccgcgctgatgaaagatgttattgccgaaccataccgcgcgcgtttactgccgggctttagccaggcgcggcaggcggtgtcggagatcggcgcgctggcgagcgggatttccgggtcggggccgacgctgtttgcgctatgcgataaaccggagacggcgcagcgcgtcgcggactggctgagcaaacattatctgcaaaatcaggaaggcttcgttcatatttgccggctggatacggcgggcgcacgagtagtgggataatcaatgaaactctataatctgaaagaccataatgagcaggtcagctttgcgcaggccgtcacgcaaggactgggcaaacagcagggacttttttttccgcacgatctgccggagtttagcctgacggaaattgatgagatgctcaaccaggactttgtcagccgtagcgcaaagatcctctcggcatttattggcgatgaaataccgcagcaaattctggaagagcgcgtccgcgcggcgtttgcgttcccggcaccggtagcgcaggtagaaagcgatgtcggctgcctggagctgttccatggtccgacgctggcctttaaagacttcggcgggcgttttatggcgcaaatgctgacgcatatcagcggcgacaaaccggtgacgattctgactgcaacgtcaggcgataccggcgcggcggtggctcacgcgttctatggcctggaaaatgtgcgggtcgtcattctctacccgcgcggtaagatcagtccgttgcaggaaaaactgttctgtacgctgggcggcaacattgaaaccgtggcgatcgacggcgatttcgacgcgtgccaggcgctggtgaaacaggcatttgatgacgaagaactgaaaacggcgctggggctgaattcggctaattcgattaatatcagccgcctgttggcgcaaatttgctactactttgaagccgtggcgcaactgccgcagggggcgcgtaaccaactggtgatctccgtccccagcggcaactttggcgatttgacggcagggctgctggcgaagtcgttaggcctaccggtgaaacgttttatcgccgccaccaacgtcaacgacacggtgccgcgttttctgcatgacggaaagtgggcgccgaaagcgacgcaggcgaccctgtcgaatgcgatggatgtcagccagccgaataactggccgcgcgtggaggagctattccgccgtaaaatctggcgcctgactgagctgggctatgcggcggtggatgatactacgacacagcagacgatgcgcgagctgaaagcgaaaggttatatctcggaacctcatgcggcggtagcgtatcgggcattacgcgaccagttaaaccctggcgagtatggcttgtttctcggaacggcgcatccggcgaagtttaaagagagcgtggagtccattctgggagaaacgctggccttgcctgaagcgctcgccgaacgcgccgacctgccgctgctttcacatcatctgcctgcggattttgccgccctgcgtaagctgatgatgacccgccaataaccattgcgcccggtggcgctgtcgcttaccgggcctatggggtggtgtcgatttgtaggccggataaggcgtaaccgccatccggcgatgccgttactgctcgtagcgtttaaagaccagctcgtcttgtgtggaggtttcttcatcaaagaaatacccttcacggtcaaacgcggtaagctgttccggcttcgttaagcggttttcaataataaaacggctcatcagtccgcgcgcttttttggcgtagaagcttaccaccttaaacttgccgtttttctcatcaaggaacacgggcttaatcagttcggcattcagtttcttcggcttcaccgatttaaaatattcctcggaggccagattcaccaccacccgatcgccctgcgcctcaagcgcttcgttgagcttatcggtaatgatatcgccccagaattgataaagatctttgccgcgcggattctccaggcgaatccccatctccagacgataaggctgcattaaatccagcgggcgcaatacgccatacaagccagagagcatacgcagatgttgttgagcaaaatcaaaatccgcgtcgttgaacgtttccgcctgtaggccggtataaacatcgcctttgaacgccagaatcgcctggcgtgcattatccggcgtaaaatgaggctgccagtcatgaaaacgcgtggcgttgagatccgccagtttgtcgctaattcccatcagcctggaaatttgcggcgccgaaagctggcgggcctgttgaataagctgctggctgtgatccaacagctccggctgggtatagcgggtcgtggccagcgggctttgataatcaagcgtttttgcaggtgaaatcagaatcagcatattcagtccttgcagggaattttctgcgactttagcaaaaaaacgccgcagagttgaccgatggttgcgattgtcggcttaatcgcgcgatgccgcctcccaggtatctggcgccagttgtggttcgatatccgggaagcgccgcggatcgaactgcggtcttacgcccagtttccgttgtcgcagataatcgctggcgagggtatacaccaccggtgagagcaacaaaatcgccgtcagattggtaatggccatacaggccatgatcatgtcagcgagctgccatatcagcggaaaactgataagcgtaccggcgataaccatgccaagcgtcgcaaggcgtaatagccagatagcctttgcgttatgtaaccgcagaaaaaacagattgttttcggcgtaaatatagttggcgacgatagaactgaacgcgaacagaatgacgataagcgcgacaaaactggcgccccattcaccggtcaacgaaaccattgcatgttggagaagctgaatgccttctgttgacgagtgggacgcgtgattccccgccagcaggataatcatcgcgctggcggtacagatgataatggtgtcgctgaatacgccaatcatttgcacaatcccctgcgcgacagggtgagggggatacgacgttgccgctgcggccgcattaggcgttgaccccattcccgcttcattagagaacatcccacgctgaaaaccgctggtaatagcctgggtgagcgtatatccggctgcgcctgccgcggcttcctgccagccaaatgcgcttttgactatcgaggcgataacgccaggcatttgctcaatatgccagaggcaaatgaatacgctgccggcgacccacaataacgcgatgaggggaatcagccattgcatcagacgggcgacgcctttgatgccgcgaatgataattaacagggcacagaacgccagagcaatgccggagataagcggcggaatgttgaaggcgaaatggagcgcgcgtgagacggcattcgcctgcacgctattaaaaatcaacccgtaggcgacgagcagaaagagggcgaaaaccacgcccatccagcgcattcccagcccacgcgccatataccacgccgggccgccgcggaactggcctgtcgggtcacgttctttataaagctgggcaagcgaacactcggcgaaggaggtcgccatgccaatgatggccgagacccacatccagaataccgcgccgggaccgcctgcggcgatagccagcgccacgccggccaggttaccgctgccaatccgcgccgcgaggctggtacacagagcctgaaatgacgtcaggccgcctggctgcgggctaaggctgcctttcagactgcggctaaattggcgaatataacgaaactgaatgaatccggtacgccaggtaaaccaacatcctgcgccgagcagcaggtaaatcattaccgagccccagagtatttcgttaataaaactgaaaaactcaggcattaacgtccctcttgttgatgccggcacgctttgataatcctgtataagcgtgacccatgatgtagatgaccttgtcagactaatattaacggcagtttaccataaatacggtggtatcctttaattgcgcatcaaccgtcggcagatacgcaaacagtgcacaagggcagccaggtgcatgtaggcggttgcgctgtgagtgcgtcgtgttatcatcagggtagaccggttacatcccctaacaagctgtttaaagagaaactctatcatgacggacaaattgacctcccttcgtcagttcaccaccgtagtggctgataccggagatatcgcggcaatgaaactgtatcagccgcaggatgctacaactaacccttctctcattcttaacgcagcgcaaatcccggaatatcgtaagctgattgacgatgctgtcgcctgggcgaaacagcagagcagcgaccgcgcgcagcaggttgttgacgcgaccgataagctggcggtgaatattggcctggagatcctgaagctggtgccggggcgtatttctaccgaagttgacgcgcgtctgtcttatgacactgaagcgtctatcgccaaagcaaaacgtatcattaaactctacaatgatgcgggtatcagcaacgatcgtatcctgatcaagctggcgtccacctggcagggcattcgtgcagccgaacagctggaaaaagaaggcatcaactgtaacctgacgctgctgttctccttcgcgcaggcgcgtgcgtgcgccgaagcgggcgtctacctgatctcgccgttcgtaggtcgtattcttgactggtataaagccaataccgacaagaaagactatgcgccagctgaagatccgggcgtggtttccgtaacggaaatctacgagtactacaaacagcatggttacgaaaccgtcgttatgggcgcaagcttccgtaacgtaggcgaaattctggagctggcgggctgcgaccgtctgactatcgcgccggcattgctgaaagaactggcggaaagcgaaggggcgattgagcgtaagctctctttctccggcgaagtcaaagcgcgcccggaacgcattaccgaagccgagttcctgtggcagcatcaccaggaccccatggcggttgacaaactggcggatggtatccgtaagtttgcggtagaccaggaaaaactggaaaaaatgatcggcgatctgctgtaatcattaacgcgtggccctgatatgggtcacgctacctcttctgaaacctgtctgtccttcccttcgcagtgtatcattctgtttaacgagactgtttaaacggaataatcatggataccttacgtattggcttagtttctatctccgaccgcgcttcaagcggcgtttaccaggataaaggcattcctgcgcttgaggagtggctcgcttctgcgctgaccacgcctttcgaggtccaacggcgcttaattcctgatgaacaggaaattatcgagcaaacgttgtgtgaactggtcgatgagatgagctgtcatctggtgctgaccactggcggtaccggtccggcgcgtcgcgacgtcacgccggacgcgacccttgccatcgccgaccgtgaaatgccaggttttggcgagcagatgcgccagatcagcctgcgctttgtgccgaccgccattctttcccgccaggtgggcgttatccgtaaacaggcgttaattcttaatctgcctggacagccaaaatcgatcaaagaaacgctggaaggcgtaaaagcggacgatggcagcgttagcgtgccgggcatttttgcgagcgtgccgtattgcatacagctgcttgacgggccgtatgtcgaaaccgcgccggaagtggttgccgctttccgtccaaagagcgccagacgtgagaatatgtcggactgaccggaaaatactgatagtagggttattcctcccggtgcgggaggaataaaagagatttagtgcgcctcgccgattggcagaatagtgcggccaaattgctcgtttagcacttcacccatcgccagataaatagcgctggcgccgcaaaccagaccaacccagcctgcgatatggatagttgcttcgttaccggtgatattgccgaccgccagcagagcgaacagtacggtcaggctcaggaaaacaaattgcagcgcgcgggcggctttcagcgtaccgaagaacataaacagcgtgaacacgccccacagacctaaataagcgccgagtagctgagcgtcaggcgcatccgtcagacccattttcggcatcagcaggatagcgaccagcgtcagccagaacgaaccgtaagaggtaaaggccgttaaaccaaaggtattgccttttttgtactccagcagaccggcaaaaatttgcgcgataccgccgtagaaaatccccatcgccagaataataccgtccagggcgaaaaaaccggcattgtgcaggttaagcagaatggtggtcatgccgaagcccatcaggcccagcggtgccggattagccaacttagtgttgcccataattcctcaaaatcatcataattgaatggtgaaatagtttcccagaataacgagttccgtattcggggcgcggcataataatcagggggaagaggactgtctatgatctaataagggggaaaagaaaatatttcccccagtgagggcattcacgcctgaacggctgccatcattcgtcgcaggcaggctatttgcaagaccgccggaatagtcacgcgatacgcgctgccgctcatcgctttgacgccgtttaacgccgcgccgaccgggccgccaagacctgcgccgcgcagcaatccgtggcccaggatgctcattgcggcatgggtacgcaaaatgcgggtaagctgggtggaaagcaggtgggagaccccttttgccagactgcgatctttcatgagcagcggcagcagttcttccagttcagaaactttggcgtctacggcttgcagaaattcctgcttatgcgccgcgtccatcttctgccaggtatgacgtaaaaaatgctccagcagttgctgttctatttcaaacgtcgacatgcttttatctgctttgagttttagccgttttgcgacatccagcagaatcgcgcggtactgttttccgtgtccgcgcaatttgttggcgatactgtcgccgccgtaatgctgaaactcgccggcaatgagctgccagttacggcggtgttgctccgggtgaccttccatcgctttgaacagctcgttatggctaagaacgctcgacaagcgagctttgcccttttcgttatgcgtcagcaaacgggcgaaatcggcgagttgttcttcgctacaatgctgaagaaagtctaaatcctcgtcgtgtaaataggtgacgttcattttcagtctggcttttggaatagaaataacagcgattaatcgtcgccaatgactttaagtctcgccatatcggaagaatttaccgtatggcctgagaaggtaatctttgatacgcagcgtttgttgtcgttatcgctattaatattgatccagcctgttgtctggccctctttgattgaggaagggacgttcaggctttggctggcgctacgcgcagttttaaaatagacggatgcgccgctaagttcgatgtcgccgtgatccgccgtgagttgaatgcgcttcacgatgcggcagacgggaattttcagcgtgagatcgttcgtttcatttctgggcatggcaataacacccagtattttatggtcgttcgcgtgcgcgacgctacttaacgccaggccgaaaagcaggccgacggaaatcgttaacacagatcgcatggaatttctctttgacgggttcaataagcaataccgtctatcatactctgctcatggcaacgattcagttttgtaatcttttctttttattacaatttttctgtgaatggtattcgttatttaatttatttcatgaatatttatctgtctggttttccatcgtgccctctcgtcactaaaaaattttttcatctcccccttgatgacgtgggttacgaccccatcttgtagtcaaccgcagtggtgagtctgaaaaaaaacgattcagggtagttgaaaccgcacgtttcgcccttattacagattcacaaccacatgatgaccgaatttttagtggagacgtttagatgggtaaaattattggtatcgacctgggtactaccaactcttgtgtagcgattatggatggaacgcaggcacgcgtgctggagaacgccgagggcgatcgcactacgccttctatcattgcttatacccaggatggtgaaactctggttggtcagccggctaaacgtcaggcagtgacaaacccgcaaaacaccctgtttgcgattaaacgcctgattggccgccgcttccaggacgaagaagttcaacgtgacgtttctatcatgccgtacaaaatcatcggcgccgacaacggcgacgcatggcttgatgtgaaaggtcagaaaatggcgccgccgcagatttctgccgaagtgctgaagaaaatgaagaaaacggctgaagattatctgggcgaaccggtaactgaagcggttatcaccgtaccggcttactttaacgatgcgcagcgtcaggcaaccaaagatgctggtcgtatcgcggggctggaagttaaacgtatcatcaacgaaccgactgccgcagcgctggcttacggtctggataaagaagtcggcaaccgtactatcgcggtttacgacctcggtggtggtactttcgatatctctattatcgaaatcgacgaagttgatggcgaaaaaacctttgaagttctggcaaccaacggtgatacccacctgggtggtgaagacttcgatacccgcctgatcaactacctcgttgacgagtttaagaaagatcagggcattgacctgcgtaacgatccgctggccatgcagcgcctgaaagaagccgcagaaaaagccaaaatcgagctgtcttctgcgcagcagaccgacgtgaacctgccgtacattaccgcagatgccaccggtccgaaacacatgaacatcaaagtgactcgtgcgaaactggaaagcctggttgaagatctggtgaaccgttctatcgagccgctgaaagtcgcactgcaggacgctggcctgtccgtgtctgatatcaacgacgtgatcctcgttggcggtcagacccgtatgccaatggtgcagaaaaaagtggctgagttctttggtaaagagccgcgtaaagacgttaacccggacgaagctgtggctatcggcgcagcggtacagggcggcgtgttgaccggtgatgtgaaagacgtactgctgctggacgttaccccgctgtctctgggtatcgaaacgatgggtggcgtgatgactccgcttatcaccaaaaacaccaccatcccgaccaagcacagccaggtgttctctactgcggaagacaaccagtctgcggtaaccatccatgtgctgcagggtgagcgtaagcgtgcgtctgataacaaatctctgggtcagttcaacctggatggcatcaacccggcgccgcgcggtatgccgcagatcgaagtcaccttcgatatcgatgctgacggtatcctgcacgtctccgcgaaagataaaaatagcggtaaagagcagaagatcactatcaaggcgtcttctggtctgaacgaggaagaaattcagaaaatggttcgcgatgcagaagcgaacgctgaatccgaccgtaagttcgaagagctggttcagacccgtaaccagggcgaccatctgctgcacagcacccgtaagcaggttgaagaagcaggcgataaactgccggctgatgacaaaaccgctatcgagtctgccctgaacgcgctggaaactgccctgaaaggcgaagataaagccgctatcgaagcgaaaatgcaggaactggcgcaggtttcccagaaactgatggaaatcgctcagcagcaacatgcgcagcagcaggctggctccgctgacgcttctgcaaacaacgcgaaagatgacgacgttgtcgacgctgagtttgaagaagtaaaagataaaaaataatcgccctttgaacgggtaattactggcacgggcgaagaggtttcctctccgcccgtgtatgcatgttaagggcagataaaaagagatggcgaaaagagattactacgagattttaggcgtttccaaaacagcggaagagcgtgaaatcaaaaaggcgtataagcgcctggccatgaaatatcatccggaccgcaatcagggtgataaagaggccgaagctaagtttaaagagattaaagaagcctacgaagtgctgaccgatgcgcaaaaacgcgcagcctacgatcagtatggtcacgccgcgtttgaacaaggcggtatgggcggcggatttggcggcggctttaatggcggcgctgatttcagtgatatctttggtgacgtttttggcgatatctttggcggcgggcgtggtcgccaacgtgcggcgcgtggggctgatttgcgttataacatggatctcaccctggaagaagcggtgcgtggcgtgaccaaagagatccgtattccgacgctggaggagtgcgacgtttgccacggcagcggcgcgaaagctggcacgcaaccgcaaacctgtccgacctgtcatggttctggtcaggtacagatgcgccagggattctttgctgtacagcagacctgcccacactgtcagggacgcggtacgctgatcaaagatccgtgccataaatgtcacggtcatgggcgtgttgaaaagagtaaaactctgtccgttaaaatcccggcgggcgtggataccggcgatcgtattcgtctggcaggcgagggcgaagcgggcgagcatggcgcaccggcaggcgacttgtacgttcaggtccaggtgaaacaacaccctattttcgagcgtgaaggcaataatctttattgcgaagtgccgatcaactttgcgatggcggcgctcggcggtgaaattgaagtgccgacgttagatggtcgcgtgatgctgaaagtaccgagcgaaacacaaacgggcaagctgttccgtatgcgcggcaaaggcgtgaagtccgtacgcggtggcgcgcagggcgatttgctgtgccgtgtggtagttgaaacgccggtcggtctgagcgaaaaacagaagcaattgctaaaagatcttcaggaaagttttggcggcccgacgggagagaaaaacagcccgcgttcaaaaagcttctttgacggcgtgaaaaaattctttgacgatttgactcgctaatcttttcccgttgtatttttcttcagcccgggtgtatatccgggcttttttctgcctgtacgcgcccaggcttctgttaaacgcatcgtatcctctcatttgttgatattttgtttttactgataaacaaattgatgttaatcagcagttttgtatacgcttattctttaaaaaaacgtgatgtgatgacattaatgattgcttttttagatgctgtgaattgatttatcttgagtattatctatattgctttttttagtttccggaggcagacagcgaatgggatcgaaaggtgccaacaagagctttgattataatttaatcaaaattcttgacgctgttattttgtcaggaaatgcggctatggcggcaaaaaagttaggcattacaccggctgccgtttctctggcgttaaagcgcctgcagagttattacccggaggaactgtttagcagagggaaaggcgggctcatccccacagctaaggctgtcgacattcaccaaaatttcagtcaggtgatgaaactggtggatgatacatttctctgtaatagcaaaaaagatgaagcgttccagataacgttattaggcagtgatattgttgaaagctattatctttctcagctctataacagcgatatatttgaccgtattttgataaatcatttctccgtaagaaatatgagtcgggagcatatcagcgaacttctgtttactgcgcaaggcgatctgttgattagtgccgaacctttgctggagtccggcatagagaatcaaatcattgatagttttaaatcatttgtttgtatctgcagcagtaaacacatgctgagtaccctctcacaactgtcgctacatcatttttattcttcgcgtcatgcgttatatcagccggggatgggggcttcagtgatatatcatgatagcgaattatttaaggatgatctttactatactggcaggcgtattgtcggctatcgcagtgattcgcttaacggtttgatgagcatgatcgaacgaacctcattgattgcattgattcctttgaaattagcgcttttttataaaaatcatcgtaaatatgacattaaatttattcagcctccgcccgaactggctttgaagtcagttcaggtctatgcatcctggaataaaaatagtagaaatatatcgacgattaatgagatggtaagtatgttacaaacactttcctccttccgtcgctaatacacctcatttttacgctttgatttaatatggttttaaatgatgtgctttgatttttaccctcctgacagggcgcttacactccttgtgttaattattcatttataatgatttcggagtgttaaaatgtctattcccaaccatgtgtcgacaacggaagttgtgctattggagctagagatcttactcactattatttcgattggcgcgtggggaggctttgtcagctatcttttacgcaaagataagacagaatataatagttctcatgaaagtattaaatattgcttaacgcagatcgtgatttcctgcttcaccagtttcttgttaagcgcgattgcgatcgaaaaagaatgcagtttcaacattgttctgttggcggcaggcttaggcggtgttttcgcgagtccgatcttaaagattcttgggcggcggattaaaaaaattatcgaaggtaataattcagattaattatcatttgcagtatcaggctcatccgtgagccttttacgcgtcttttttcagcctggtctaggtcactctattcttgatccagccataaataaattgttcgttattgtggtttttctcagcaacgtttaagtagtacgtgccctgactgcaattgagggctttcaccaaaacggcttccccttcctggcctcgccaggccaaataatgttcgagagcggcaagcgtccgcgggccaatattgccatccacatgaatatccgggtagcgtttaccttcgtgattaaagacgttcaaccagcgttgcagccacgcgctggggtggtaagcgcctatgttgactgccgcatcgcacagctcgaaggagactggccacgatagcgtcgagatgacgtcaaaacctggttttatccagtaatcctcttcgagaatcgcgtaggcttcagcgtgggtcagatcccgcatatcgccagcatagccatgcgctcgcgccgtggcttcggtaatgccccaatgggtggcgccgcctttatctttagggttaaatacgtaaccgccttcaagcgcaataattccatctataattggattcatcttccctttccttcgcttagtgaatatgcagatacatgagagaacctaacgttactgaaaatacggtcgtcagggcggcgatggtttgccgtacaatctgtttttttcttccctttgtttcgctatccgtcgcgataatggtgatatcactattaactttgaggccttgtcttggaatggtaataaaaagatcgttaataccaagcgctttaaggtcacgtctgattaaatagagaatctgcgttagatttgcatcattaacataatggcttcgacttccccataacgcagtggttattttttgtcgctcgataatctccagatgagcattctcgatgatgaaactgagacatttggctctcatcgcagtcattttaataacctgtgaatttgagaccgtcctcagttcatatttaccttcattgtaaatgcaattgctattaatgatataagttttcataacgtcttcctttagaaatgtacatcctggttgtctgtggtgactatattgtatgagaaatgtcttaatccaataaatgtcactggttttattgtattgtcattgtctatagcgagtgtaatcacattatttcattgtaattaaatgatatttaattacatgataaatgatatttactatgttctcaccagaacggagtaagcgggcgctgagaggtgttgttttctcttcgttagacggtgttgttaacctcatttttatgatttttatatcatctaaaaagatgatgttttgtgattagctattttttatgcctgtaacgattatggaccccgcagaacgagctgcgacaattttgaaacgtaaaaggaaatttgaaaatggctacaagcaaactgattcaaggcgatacaattactgaaactactcatgcagcgaatggttttgaccctgcaacaagcgatgataaaataagctatacttccgctcgtgttgcgaaaccggtatacaataaatataaaaattccacgactaaaccgaaggtattcggttattacaccgactggtcacagtatgacagccgtctgcaaggcaatatgtcccaaccgggccgtggttatgatttaaccaaagtttcaccgacggcttatgacaaactgatttttggctttgttggcatcaccggtttcagaaaaattgatacagaagaccgcgatgtcgtagcagaagcggcagcgctgtgcggcaaagtgaaatatgagccgaccttcctcgacccatggggcgacttccagtcttatatcaacctcggctttgatgtcagcggctgggatgtggatccgaagactgtaactcagtctaacgccaagggtctgctgggcgcgctgcgtgatatgcaggcaaaagcgaaagccgcaggtcacacgctggcgctctccatgagtatcggcggctggagcatgagtaacgggttccacgaaaccgccgcttctgactcttctcgtaaaatcttcgccaaaggcgtggtgaaactgttcaaacagttcccgatgttcagcgaagtggatattgactgggaatacccgaacaatgaaggggcgggcaacccgtttggtccggaagatggcgctaactacgcgctgctgattgccgaactgcgtaaacagctggattccgcgggtctgagcaatgtgaagatctctattgccgcttctgctgtcactactatttttgactatgcgaaagtaaaagatctgatggctgccggcctgtatggcatcaacctgatgacctatgactttttcggtacgccgtgggcggaaacgctgggccaccacaccaaccgcaaagcgctggaagagggcggctgggctgtcgaaactatcgttgatcacctgctggcagaaggtttctccgctgaccgtatcaacatcggttatgccggctatacccgtaacgctcgtcaggtagaaattgaatccctgtcgccgctgaaaggttcttacaacccaggttcaggccctactaccggttccttcgaatccggcaccagcgaatggtatgacgtcatttatagctacctggatctggaaaaccagaaaggccgtaacggtttcaacgtttacaccgaccaggtcgctgatgctgactacctgtatagcccggaatccaaactgtttttatccctggatacgccgcgtactgtcaaagcaaaaggcgaatatgcagcgaaactgggcctgggcggcgtgtttacctggactatcgatcaggacaacggcgtgctggttaacgccgtgcgtgaaggtctgggttatgaaatcgaatctgaagttatcgatatggaaccgttctactttgaaggtatcaatgtagaaaaagatgaagagcagagcgacagcgacgacgcgcagaaggtcaaccacgcgccgaaagcggcgattgaactgatggttgtaggcggatctacggtacagctgtctggcgcaggttcttctgatgaagataacgatgagttgtcctttagctggggcgtgccttctcaaatcgatgtggcagacaaaacggcagaaatcattgaggttgtggtaccggaagttagcgaaaaaacagcctttcagttcaccctgtttgtacgcgactgctacaacgaaccgtcctctcaacagcgctttgttctgacggctgtgcctgcgctatctcaggttcaaccggaaccggaagaggaagaagagattatcgttcctgtaccggacgaggaagaagataccacgccggctgaggatgatacgccagcagatgacaaaacgtcaccttacgcgcagtgggatgcttctaccgtttatggcgcaaactggggttctttcgaaatcgttagctggaaaggccataactatcaggtgaaatggtggtctatgggcaaccagcctgacctgaactgcggtgtcggcggtgcatggaccgatcttggcgcttactaatacacggtattaagccgatgtattgggcttcatgattcaagccccggtttaccggggcttttctccaccagggacagaggaagagtagaccatgaccatttccattcacgccagcgcatttgacgtcaacagctggtatcaaaaaattaccttaactttcatcaatgagagcggtaatgcggtcgatatgaaccatgccgcaatatcattcacggcttccgggcacatcgatccatggggaaatagcggcggtacgctcaaagggaacctgccgcttacgctgaatgagagttcgtatggcacgctggaaactaacaacatcatcattaataacagcgatgcattacttcttcagccgggcgaacgcgggacgctctctttcagcctcgcggcgacgcaggtgccggtaaaaatgtccgccatcaccttgacgctggcgtcatcgtcatccgaagacgcagagtctgcaaccccatccgatcaggagacgccagcgatacccgccgcagacgaacaacccgccgaacccgatgtgccggaaaaggacaatgaccttcaggaacacggccttacgcttaacgttagcgagttgaataccgcaagttggtatcaacgcgtcacctttacgctgaccaacctctacgcccaggcggtagatctcaatcagcttcaactgaattttacggccagcgcgcaccccgatccctacagtccgtttcagggaacaatgttggggaatcaggccgtgacgctggccagcgatgggggatggcccatcgagaagaataccatcaccattaatcatgacggcgcgctgatactggcggcgggggataccgccgaattacagtgctatctggccgccacgcagacgccagttgccatcagcgatttgaacgcgacgttggcccatgatcctgcccgtcagggaaaagtttgcgttcattttcctgccatgacgcagaccgtggcgctcaaaccggtgattgagctgctgtttcctgccggcgaaacccggcgctttgtcggtgagtggggcgaggttctgacaataggcgatcttagcgcaggaacgtatcggcttaccgtaccggtactggcgaatgatgagatgcaaatcgcgccagtcgagtcctcttttaccgttacgctgcaatccggcgatgccgccgcgcaggtccaggtatcctgtctgccgattgtccgttatgccagcgcgcgtctgatgattgacgcccctgcgcttggtaatgcgaaattgaccgttgagatcgccgatgctacgcaagcggatgagcgtaccgtcacgctgatcgccaaccaaccgcagttaatcacccggctactggcggggcatcattatacggtcaatctgcagcctgcgatgattaataaccgctttatatcggcacccatacagcttacggggtttatccctgctgcggcgcagattgccgaggttgctgtcgcttaccaacagtcggcgctcgacacggcgagtttcgtgacggtggatgccactatactgggcctgcccgatggcgtcgcgccgcagcgttatctgttcagcagcggtaaatatcagtactcattaatgctggagagcggcagcgatcggcagacgttggcattacgctttgcacccgggctgtatgatgttcagacggacgacattttcatcgacagtgtgccgtggcgttgtgaacaggccgggccgctacggttgttgcaaaaggtcaaccatgtggcgctggagtttctgcccggcgtgacgctacaggtaaaaggttggcctgattaccttgctcatggcggcgtgacggttaacgcgccagagacggtttctctttatcgcgatataccgtttagcgcgttgtttaaatacgatggttttgacggcggcggcgatccggttccggccgcggaggttgacgtgaacggggatggttttctggattacgcgacgttaccgatccataaaaccgttgcgctggtgcgccagatagaaaaagaagccgggcgtagcgtcatgccggtaatggtcatttataccgcgaatgccagcggcggtagcgcgctggcggatttacaggatgcgcaaaagctacgtaaccattttggtaactttattacccagtgtctggcggcgcagtcatacaaagatgagacgcatcctgtcccggccacctttgtgcttaacccggattttctcggggcactacagcaaggaccgtatggctataccgtagtacggcaaaaaaacagtgtgccggtgaatgcccaactggcggcggcgatacaagcattaccggcgatggctggctttatcgcgccttcgttgccgacgtttagcgacgatctctacggctatattcaggcggtgaactatcttgttcgtcagtttgccccggatgtggcttttggctggcagacgaatgtctgggcgacaggaacggcggactgggtgctgcgcgataccgctgatccggtagctgaagggcaggcgatcgccggatttattcatgaactgggcgtttacagcggagaatatgcgccggactttattgcgtttgataaatttgagtgtgactgtttcagtcctgatgcgcttgcccactatggctggaatgcgacatgctggcttaattacctggcgatggtcaaacaggtgacgaaagcgctgctgacgcccgccatgctgtggcaaatcccaggcggccatatgcctacagtagaagagggcgtcagtaaaatcagcgctgcgcactttgcatccggcggaaccttttttatgggtgacgcccgcattggcagcgatcctgacacgctctctttgcagctactcaatacggccttaaatagcgcgacttacggcgtcccgaccgtcggcgactttttacgtaaagataaagggtatgactggggccaaatgcaggcgctgaacctaccggactttaacgtcttttcgatcttatggggcggtggttctactatcagtattacgacaatccattctaacggtgaagacggcggctggctggcggataaaatggtagagtattatgctgcccctcgctatttcagataatatcactgcttatttgcattaatctggactattagtttgagattcgaaggcgcgttctttcgaatctcttttcctgcgccccctgacctctcattctttatacgtaatttgttattaattttctgtaatcattttgtattaagaattgtcttaatcttaaaaatattgcgtattagtgcgttgtgaatacagaaatactgcatagcgatgttatttattattaatttaagtactttttgagaggttatactgtgacgctacattgagtagacaaccgttaatgaaaaaaatgatgaacgacgcttttgctaaagataataatgagaattcattacactcttttcttttttctcagcaggctaaacctcacgcggcaattgatgccttattttcggccttgttgccatttggtcaaccgtttacgctgggtatcggcgatgagttttatttacaggcaaacgatgaacactacattgtattactggagtcaggcgttgtttctttctgtcatgatgacaaacgactccatatatcttcatcgtttgcgccatcggtcgtgggtatggttgacagctatggcgctacctataacgtccccgcgcgaccggaacactttttgctcgcagaaacggtttgtaccggtagatttgttcgcctgccggattttataaaaatcgccgatgaatgcgatttgtggcacgacgtggcccgttgtctggcttaccgtctgatggtgatgagcgcgcgcgatcgtgaattagtcggcgtcgattcttatctgaaagttcgggcgctgctgactgaaatctgggcttatccacaggcctaccgggaaagcattatcgtgttgaattttattcaacggcgtaccgggatatcgcgcagtcggaccatgaagattctgtctgaactaaaaaaaggcgggtatatccatattgataatgggcggctgacggcgctcggaaaactgccagtggcgtattaatgcactatccgcaacgatatatttacatatctcgactgaatttgcctggtatcgttaatagaatgttttactgaaggttgttatgaaagctatttttaaaaagtcaatatggctaaaggagataggccgaacgactggtgtaaagttaatataaaacaacaggttatgcctggtcctataaaaccaaatgtcgatgattgcaacttgccgttggcttgctaataattaataacatcgttatctcattataacgtaaagataaactcacgacgttgagtggctgttttattgcttctgacatttatatcagaacaagaagacactttttttcgcataagaaaaagtcgtgatattgctgtgaagaaatatcagcagccgtttcgttaaaaaatctgattacccttatttttatatttaaaaggagcttgaatgaaaaagcctgtactagcattaatggtctctgccattgcctttggcggaatgttgtccaccgcgcaagcggatactacaaccgtcactggcggtacggtaaattttgtcggacaggtcgttgacgccgcctgttctgtttccgctgactctgtcgatcagaccgtgacattaggccaggttcgcgccagtaaattaaccgaggccggtatggtggcgaatcaaaaagaagatttcaccatcaaactggaagactgcgatactcagaccagccagaatgcggcggtgatttttaatggccaacaggacgcaaaccagccggggtcgctggcgaataccgctggggcaggttcggcgacgaatgtggcattacaactttatggaccagatggccaggcgctgaatatcggtgaatcgtccagtactgttaccttgaatgatggcgaaaacgttattccgcttagcgtggattatatcgctaccggtacggcgactgccggtaatgttaccgcgacggcgacatttagcatggtttattcctgattccttatcgggatttttttctcgtctgttgggaggcgagaaaggggcgttacgcgcgtcactgcgcgtaacaaaccgacggcatcaggatattacgcagatgaaaaaaaacgtaccgattttccttcgattattgctactgctgtcggcggccggcctgtcgtttgccgcgcaggcgggaggcattgcgctgggcgcgaccagggtgatttatccgcagggaagtaagcaaacctccttgccgattattaattcttctgccagcaatgtttttttaattcagtcatgggtcgccaatgccgatggttcacgctcgacggattttatcattacgccgcctctctttgtgatccagcctaaaaaagaaaatatattacgtattatgtatgtcgggccgtcattaccgaccgatcgcgaaagcgtattttatttaaacagtaaagcgataccctctgtcgataaaaataaattgaccggcaactccctgcaaattgcgacgcaaagcgtgattaagctatttatccgcccgaaaaatctggcggaggcgccagctcatgccccgtcgacgcttcgctgccgtaacgagcgcggccagctaacgattactaacccttcgccgtactacgtttcgatggttgaactgtatagcgcggggaaaaaactgccgaatactatggtaccgccgaaaggcgcgatcactctcccggcgacgcccggccaggtatctttgcgcacggtaaacgattttggcgcaacgacgccagcacgcgtttgtccagcttcatgatgttatgcgtaatcagcttttcatgacgcgatattactccagcgtaactaaacccgtattaaccccgctggcgttggctatcgcactggcgcctgcgccggggtgggcggaaaactatttcaacccggcatttctgtctgacgacccgtctgcggtggccgacctatcgaccttttcccgtaatgcccaggcggcggggatgtatcgcgttgacgtttacctgaacaatacgtttctcgcaaccagagacattgccttccaggcggtgaaaacgacgggaaaaagcgcgcccaccgatgacagcggattacgcgcctgcctgacgcctgaaatgcttaaaaatatgggggtaaacaccggggcgtttccactgttggcgaaggcggcggcgggaagttgcccggatctcgccagtgcgataccggccgcccggacccgctttgattttgcgcagcaacgtctcgacattagcatcccgcaggcggcgatggttgccagcgccagaggctatatcccaccgaaatactgggatgaaggtattaatgcgttgctattgaattacacctttaccggcgcgaatagtcaggatcggagcccaggcggcagtgcggagaacagctattttcttggattgaatagcggccttaatctgggggcctggcggttacgcgactactccacatggaacgcgaatagcggcgatcagaatagcgacagcgactggcagcacatcagtacttatctggaacgtgatgtggtctttttgcagggagaactgacggcaggcgatagttataccccctccgcattattcgacagccttccttttcgcgggctacaactggcgtctgacgacaatatgttgccagacagcatgaagggcttcgcaccgaccattcacggcattgccagaagcaacgcgcaagtgaccattcggcaaaacggctacatcattaatcagcgctatgtgccgcccggggcatttactattaatgatctctatcctaccgccgccagcggcgatttgactgtggaagtcaaagagtccgacggttctattaatcgttataacgtgccctattccgccgtgccgattctacaacgagaagggcggctgaagtatgcggcgacggtggcggagtatcgcagcgatagtagtcaaaaagagaaggtgaaattcagtcaggcgaccttgatatgggggttaccgcatggttttacgctgtatggcggaacacaactttccagtcattatcacgcgctggcgatcggcagcggcgcaaatctgggcgactggggcgcggtgtcgctggatgtcacccaggctaccagtacgctggcggataataacacctaccaggggcaatcgctgcgtttcctgtatgccaaatcgcttgcacagtcaggaaccaatttacagcttatgggctatcgctattcaacctcgggcttttacacgttggatgataccacgtggaaacggatgagcggctatgacgatgacagtcggactgacagcgataaaagcaggccggaatgggcggattattacaacctttattacaccaggagggggaaagtacaactcgatatcaatcaacagctaggcgggttgggatcgctttttattaccggcagccagcaaagttactggcacactgatgaaaaggattctttgttgcaggtgggatacagcgatacgctggcgggtattgcatggagcgtttcttacaacaataacaaatccgcaggcgatgcggagcgcgatcaaattttcgcgctgaatatctcggtgccgctaagtcaatggctgcaacacggtgatgaggtcacgcgccatcacaatgtttacgctacctttagcaccagtacggacaaacagcataacgttacgcagaatgcgggccttagcggcacactgctggacgaaaacaatcttagttacaacatacagcaaggttatcagaatcacggtattggcgaaagcggcgccgctagcctggaatacgatggcgcgaaaggcaacgccaatattggctataacgttagcgataacggcgattaccagcaggtgaattatggcctgagtggcggcctggtggcgcacgcgcatggagtgacgctaagccagccgttaggcaataccaatattttgattgccgcgccgggcgcagccaatgtcggcgttgtcgaccagccgggtattcatacggacgcgcgtggctatgcggtggtgccgtatgcgacaacatatcgccaaaaccgtatggcgctggacgttaacgccatggcggatgatgtcgatattgatgacgcggtgactcgcgttgtgccgaccgaaggcgcgctggttctggcccgctttaaagcgcgggtcggcgcgcgtgccctggtaacgctgaatcataacggtaagcctgtaccctttggcgcaacggtgacggtgaatgatcgccatgcggaggcgattgttgacgaggccggggaggtctatctttccgggttgtcagcgcaaggcgttctgcacgttcgctgggggaacctaccggatcaacagtgcgtcgcgtcctatcatctctcttcctcccgtcagattctgagtcgacaacatgcggagtgtcattaaatgaaaatacctcttttatttgctctgctggcgggaagtgtcgtatcgcagtacgccttcgcagacgtgtgtaaaaacgttaacggcgtgccttccagtattaattacgatttaacgaccactctgacggcagaacaaaaccaggtgggaaagacggttcaactggaaaaaagccaggaagttaatgtacaggcggtgtgtcccgccggcgcgtcgacctatagccagacttatcgctcctatgtgtcgccatatccggtcgtagaaacgagcggtaactggaaatatttaaagctggacccggactaccttgaaggcggaatgcgaattgaggattcttcggcgggcgatatctatccgccaatgaacaatgtcctgatgggatatgatgaaaatgtgaaagcgggtcaaccgttttacgttcgtgactcaaatctggagtttcagctcaaaattgttaaaccgttcgtcggcacggtgaatattagtcctaagactatgtttaatgtttatgtcatgaccgccgcaggcgatccgctgacagatgtcgtgtacagcattctttatagtggaacggtgaccgtaccgcaaagctgtgaaatcaacgccggacaaacgattctggtaaatttcggcgcattatacagcggcaatttcaaccatgcaggccaaaagccggagggggtacgagcgaaaaaattcagcgtaccggtaaagtgcagcggtctggattcgcaggtcaatttaacaatgcgtcttatcgctacgccggatagccacgttccccaggctatcgcttcggataatgccgatgtcggcgtagtggtcgaaaccgatgaaggaaacgcgcttatccccaatgatgtacagagcgtcgcgccttttatcaccgatagcgccggacgcgctaacatcacattgcaggcctacccggtaagtacaacaggcgaaacgcctgcggaaggggcatttaccgcactggccagcctgcgagtggactttgactaaatgaacagatcacactgcgctctttttgccatgggactgatgctgtgtccacaaatcaatgccagcgctgacgacctcgcttataacctcgaatttaccggcactattgtggcgcaaacctgcgacatagatatttccagtctcagtcaaagtattgatttagggcagtttgcagttggcgatttcccctcgacgggaacaacgacaaaatttaagccctttaatatcaacctcaaaaattgttcccgaggaattaccggggcgaagatctggtttaccggcgaacccgatccggacaatcccgcgctactggcgataaccgacaccgggatgggaagcggaaacatgttagcaagcggggttggggtggaaattctgaatgatgatcaggataccatcagtatcaataatgccgactcggtggtctatccgttgaaagccggacgcaacacgctgtctttttatattcgctataaatcgacccggccgacggtcacgtccgggaacgcgacggcggtcatgtatttcgatatgcagtatgaatgaggagccatcgtaattatgcgtaacgatatcctgtacggcatcgggatgctgctggcggcatccggcgtccaggcgcacgatggccgggtctatgtttccggaaccatcacggacaatacgtgttcgctctctcctggctcggaaaatattaacgtggcgatgggcgcggtttctcaacggcagttttatcgcgcaggcgacggttccgcatggcaaccttttgctatcgatttacaaaactgcggcagcactgccagcggcgtaacggtcagttttagcggtgcggcggacagccgtaatacggatttattggcgcttaccgcaggggaaagcgacgcttcaggcattgggattgcgctttatgatcaaaataaaactttaatcccactggggcaagagagtgatgtggtgacgctcagtccgggtcaggcgtcggcgcatctgcaattttacgcgcgttatcttgccgatggcggcgcggtaacgcccggggacgccaatgcctccgcaaccttcattcttgcctatgaataagttctttttacgctgcgcgatatattggtgcttgcttcccatatcatgggcgcaggctggcgtggtaattggcggtactcgctttatctatcatgcgggcgccccggcattaagcgtaccggtaagtaaccgttcagaagcgtcctggttaattgatacgcatattttacctggtggccgctggccaggaaccaaaaacgaagggaatatcatgcccttcgtggtcacgccgccattatttatgctttcagcgcgccaggaaaactcaatgcgggtggtttataccggcgcaccgctacccgccgacagggaaagtctgtttaccttgagtatcgccgctattccctccggtaaaccggaagcgaaccgtgtacaaatggcgtttcgttcggctttaaaattgctctatcgccctgatggactcgccggcaatccgcagcaggcctaccggcatctgatctggtcgcttacccccgatggcgcgacggtacgcaatcctacaccctattacgttacgctctttttattacgtgctaacgagcgcgcccaggacaacgccggggtcgtggctccctttgcaacgcgtcaaacggactggtgccggcacacggttcgctgcactgtgcgctggcaaagtattaatgactatgggcgggtaatgccagcgcaaaccgtggatctgacgcgtattcattaacctatttttcaggcgtctcccgatagcgggaggctttccgaacttatcgaacgagacttttattatgtattatcacgcgttaaaactttcccgactggcgatgttgacgttggcaggcgttgccgtatccgcctcggcaatcgccgccgattctgccccgacgtcgcaaattggtccgacggcggaagcctacatcgtcagtcatccggataaagtgggagaggtcgtggcaacgtatttggccgaacatccggaatttttggtcgccgccagcgagacgttgcatcagcgtcagcagattgcgcaacaacaggcgtatgttcaactggcattacagtatcgtgctgagttgctcagtagcagcagtccttccgttgggcccaacgaggcaaaagcggcggtggtgatgttctttgattaccagtgctcgtggtgcagcaaaatggcgcctgtggtcgaaaacctgattaaggcgaacccggatacccggtttattttcaaagagtttcctattttttcctcccgctggccggtatccggactggcggccagagtcggcgaacaggtatggcttacacagggcggggcgaaatatctcgactggcataatgcgctttatgccacagggaaggtggaaggcgcgttaacggaacacgatgtctacaccctggcgcaacattatctaacgccgacgcagctggccgccgtaaaagaagcgcaaagcagcggtgcagtacatgatgcgctcctcactaaccaggcactggcgcagcatatggactttagcggcacgcctgcttttgtcgtcatgcctcagacgcaagacggtgatgtaaaacgggtgaccgtgatcccgggaagcacgactcaggatatgttgcaaatggcgattcagaaagcgaaggggtgatattcgctcagaggagaacgcacaggagtgaaagtaaaatgaagtctatgcgttgcgtcataccggtgattttactttcctttatcgttcatgaagggacagcgaaaccgaccgctcagattcattttatgggatcggttgttgaggcaggctgctggaatgacgtaggaaccttagaaattcaatgccataataaagagggagttgaacgttatattattgtcgagaatattatcacgccgatatcgtctcctcatgcaacggtaaaacgagattatttggatgaagataagcaattaacagtgctacgcattgtctatgactgaaccgcgtagcagaccgcagatggtgtcccgtcagtgtcgtgtgagaatattatgaaaaatgttctcaccttcccgggacacggtctacagactttatcttcagataaacggcgctaaaaagaaaagcacgaacaataaaaaaagagtgggaataccaatagatataattttattacatcggtgagtatgatattgaatagcttgtggcggtatgtcagcagcgtcaatgataaatctttcatcgatttttatcccctgcctggggagcgtaacgaacagttcgaaaagcccgatttgttgtaaatctcgtcgcagcagataaagaagttgcgtcaaattagcatcgctaacaaattgacttcgctctccccaaactgcgtgtgaaatcatctcccgcgtaatcagtttcttgtaggcattttcaaaaagatagcttaaacaacgcgcacgcattagcgtcacctttagcacttttttatcatgtaatgatattatttctcttaacgactcattataaataaattcgttattaatagtatattgtctcatgaattcactccgttttgatattcataaggtacgtttcacactgtcagtgtgttcactggcggtaaagtactccttacatcagtacggataagcgtagagaaccgcaaagaaataagagaatcatttatgattaaacgggataatattatgcttttttacttttttataaagtgtgccagatatttttgatgttttttataaaatagcatcatgtgtttttattttacacaggctgaaatgatatcaataaaattataatttaataacaaacagatagaggaaatgatttacttattgaaataagtgtggtgcaaggttaatctgcgccttaaatgatggtgccagattataccagccaggataacctatatgcggccaataaaaaatgctaaaaaaattgactacaatctgatcaaagtgttcgatacggttattactgaaggaaatgcaaccagggcggcgaggaaactggatgtcacgcctgcggcgatctctcaggctcttcttcgtttacaaaatctttatggcgaagagttatttatcagaacccgcaaaggattagttccgtccagcaaaggtaaatcgcttcaccaggtatttcgccaggcaattgaatctatagaaagcacactgtgcgataaaacagatgctcaggagagtaatgaactcattgttctgggaggtgatatcactgaaaattactattttccggcattgctggatactgtgttgatgaatcgatatattattaaacactatgcgattaaaaaaacaggggaatactcaccagcctccatgctgacgcatggctatgcggatgtcatcatgggaattctggaaattaagaatgagatgatcgaaagttatcttattgataatttatctgattttgtttgtgtttgtggtgaaaaaagtccattggttgggcttgaaaaaatgtctttatataatttttatgctgccagacatgctgtctatcattcagatatgttctcttctttcaccgctgatagcattgatttattcaagagcagtacgccttatgcggggcgcagggaaataggttattatagtgattcactatttggcgttatcgatattgttgaaaaaagcgatatggttgcgattttgccaggaaagattgctacttattttagagatgtgcggcgttataatataaaaatactacgtatgcctgatgaaatgatttttcgtacgttacccgtttatgcttatctggctacaaacagcacccattataaaaatgtcaaaaaactgatatcaacatttcagtcgacctttctttttagccaggaaaagcagcctgacgctttggttgaaggaagcacatccttatgcgatttgtcggtttaatatcaaattatcgtattaaataaataaccattatgaccatggtcagtaaagcgaaaaataatgccatatatttatactcttctttttttaaagaagaggggaggcagcttttgttttcattgctgataataatgttagcatctactttaatacccgttcgaggcaccgtggaaaaaaactggctcaggccaaagcctttaaggtcgcgccgcagtagatataatatctgggtcaggttggcgtcgctgataaattgacttctttccccccaaagttcattagtgagttgttttttataaataatctcttgttgtgcatgattcagcatatattccagacactttatgcgcattgcggcaatttttatcatctttcccgtttttatcttttttagctcattggtcttatcattgtaagtgtgcgtgctgttaattaaataaatagtcatgatgttatttaatgggtttaattagggtggcgataataatatgcatattaaatttatggatcaactggtgtgattgtaatagcgtcttttttccagagaaaatcgtatcgtgtcacaaaaatgatggttttttagaaaaactaaaattttatttttagtcgctctaaaaataaaatgatagtagtgttaatttttatcagtatattgatatgctttgattgatttattgttgacataaaataatttgaattatggcgcaaggcctatgccaaccataaaaaaggtataggctattggtcacaatgcattaatgctacataattgttatgcttttatagtagcgccagggaaataaaatcttcggacgataaagaatagttttagtctgggtgttattttatggatgttttattttaaattattaaaccgatttctcttgttgacgtagggttatttgctaagcaacgggctggcatgttgtagccgctcgttgcctatatcccaattaatcaggagaaacgtatgaataagaaaagttcgtcaatggttaacatgcccgcaccgcgtgagccgattaaccagaaaatcgataccaataacgcactggttttaaaccataacgccatatatgaacaacgattagcggagatcacgcaatctaatacctgtgacaaggccattgtcaccgtaaatccctacgggaccgccccgttgagtctctatctgggggtttggatggatgaagctgccgcgcttgagatcaatgttgttgatagcgaagcgacgacagaggaagtgcgttatcaatatgatgtacatccgggcgctaaccttattcctgtgtgtgggatggtatccgcggtgaataatcagattaccctacgccttgcctcgcaaattgtcgggcaatatacagtaatgacagacgcattaccgcccacggattcggctaacgtgagcctcggcttccctattattagcgtctcctgtcctgcgcagcaggcctcgctgatggaggaaggactttatttctccacttattttgatcggtataatctggcttttgatcataacgggattgtccggtggtatgtaagtcaggaaatcccttcttataattttgtcagaatggataacggccatttcctagcgacgtcacagggaataaaccattgtctgaatatgtatgaatttgacattatgggacgggtttatacggtttatcttctcgacaatgagttccatcactccattcttcccattgagaacaatctggcgattgcgccttcagaatatagcaatggacggccagacggttactcaaccgggaaagatggcgtttctattattaacttatctaccggacttgaagtcgcctattacgatatgctgtatgtgatggattattccagatcgccgcgtccttccggaagcgcgccaggtcaggacgtatcaatggatgactggctgcatatcaaccaaagctatattaatgaacccaacaatttgctgatctgttccggtcgacatcagagcgcgatttttggcgtaaatgtggattccggcgaactgcgctttattatggcgaaccatgaggattggtctgacgaattcaagcaatacttattaacccctgtcgatgatgatggtgtcccgctgtacgatcttacctcgccgggagggattgatgcggcagataagaatttctggacctgggggcagcataacattgttgaaattccaaacgatgagcctggtatcctggagtttatggtctttgataatggtaactatcgttcacgcgaagatgcgaaaagtctgttgccgctcgataacttcagccgggtggtgcagtttaaaataaacctaaatacgatgaccgtaacgcgtccgtatgagtatggtaaaacggaagtcgggaaccggggctatagcagttttgtgagcgctaagcatttattgactaatggtcacctggttattcacttcggcgcgacgacggttgatgagtttgaacataccattaccgcgcaaccaggttccagcgatcttgtcgatccggatgaagggcaacaggcgttaggtcgactggtattacaagaaatcaataaagagacgaaagaggtcttattcgaagcgatggtgacgtcgggctatttcaagaacgaagagacgaatggcacgaattatcgttatgatatttctgcatttcgggtatacaaaatgccgctgtttgcataactaagtatgttatgcggccggttatcgaccgcataacattatggcttatttgctaatatcatccacgcgcatggtgtggtcaggttgaatattgttaacctgcttcatatagttaaccaacgccggtgcggtttgtatccctatatatttgatatttttacctttagtgaaggtaaatccgccaccacctttaccgataaaggagtccagcgcgacggtatagagtttattgtcttctaccggtttgcctttgatatcaaattcaacaatacgctggcccagcggtttggtgctgtcatatttaaactggacggttttagatacgtgcagcataccgtttttcagatcggcagcgtgtgacatgatggatttcaggtccttaccgctgatttccatgctcatgacatcgttggtgaacggatacatactcagcacatcaccataggtgatattacctttaggcaattcggtacggatgccgccagcattatagaaggaagcgtcggcgccaggaacggtagccatcagggcatcggtgattaagttgccggttggcgcggattcaccgtaagaacgggtcagcacttccggagagtgcgcgaccacctcatcggtaattttcttaaccttgttatcccattcgtcaattttggcctgcgtgaccggatctggcttataagtatccgcatacatggtgatcaacttaccattgtagctgtccacttttttggtttccgggttccagtcaagcaccagtttacctaattcgatggtgtacgcatccgtggaaacgacaagggtatcgcccactttaatcggttctggcgtacctttatgcgcatggccggtaatcaggacgttaagtccatagccttccagcgatttcgccatatcaacgtcggttttcagtgcgcgtgcgacatcagcctcgcctgcgctggactgcatacccggcacgccttcgtgggcgagcagcacggtcaggtcaactttcccttttaactcttccagctgttttttcacataaggaatcggatcgcggcagtcaacgccttcacgcacgcctgcggcaatcgcttcatagaatgcggaaacgccgtgcataccgatgacgccgatcttgaatccatctttttccacgatggtatacggttctttaattaatggcgtatctgtgccgctgtaaaaaacattatccaacaataccgggaattgcaatttgctgagttgtttaaccagattctcatggccatggtcaaattcatggttaccgacagagacggcgtcgtaaggcatggtatttaaaatatcaataatagcctcgcctttggtcagcgtactgataaaaggtccggtgaaatagtcgccagcatcaaagaaaaagacatctttctctttcgcttttgcatctttgacaattttcgagatgggcgcaaagccgcctaccggacgtgtcttggatacataggggataatttctggggttacatgggcatgtaaatcgtttgtataataaattgtgatgtcacgcgcatcggctgaaaaggaaatggctgaagacaaaccaatgcacagcgacagtagggatatcgaaaactttttgttcatataaaccatccatttacgctacattaaagaaaaacaatgcctgtagtcgtgtcattcacgactacaaaccggggaaattaagtaatattcatcaagtttattaattattaaaactcgaagccgatcaggtaattcatacggtcgccgtagccgtcataccccaatttattattgaagtaacggtaagagacggaggcggtccatcgcggcataaatttccatgtaaacgttaccgcgccgttcaggccggtcgtcccaccctgttgttcggcgtaggcatcattacgatccatttcaacttcgttccagtttgaaatgacgaacttttcattaaacatatcgaagttataagccgcgacccaaccgagaacataaccgttaaagcctgtcgcctgtccatactttttagaggtataatcgttcgataagttatgaacagcgaaatagggcttaataaagcctgatgggctggttaaacccagataacctaccccgtacatcatgtttaattcatcaccgaatttattctccatcgacatatagagtttcatcattgcggtaaagttagagccttctactaccctataatgtcccagaaattgggttacatggttacggccttctaccggatggttgagcacgttcatttcataaaatgatgcaaattcgcccctgtcaaacacggcgccgaaatcggctaccgctttccacacttcgccgcgatcgacattgacaaagcctttattccagtcgccatatccgaagctaagtttaccgtatacgcgtttcaattccgctgcctggccattaaagcaagagaaaagaacacatgcggcgagtagactattaatatatttcttatttttcatgctcaactccatgaggtaaaaacacagtgaaatgttgtgtaaagaagcgaattctaaggagtgtctttttatacgtaggtgatagatgtctcaaaaatatcagcgacatataatcgtcaaatattcgtgtcagataatgttgtttattacgtgataactatttgatttatagtttatgtctctgttgtaaaagtcacaccggatagcatgaaattaatgaaacttcgaatgggaataatctctcgcaaagacaacttactgccattaaatgagggtgttaccgttcaaacagcaacatatattgacatcacaatagcggttctgacatatgggccatatttgagatctgcatcactcgttcgcgatttctttttttatagactgcttcaggcgtgttttctttagcacgaaatatatttatggtattaatattataatgagtgtgaataattttctacgataaaacgatgttaatggaagaaatataagacaaatcgaatatatatatagtgcaattaatttaggctgtattccgcagccgggtctatcggcaaatatatcgtaatcagaccgtgcgataactcaaaggagttgaaatgaaaagaacagtcgttgccagtatgatagggttggcgctatgcgctggatgcgtattatcaaccgcgcaagcggcaaccgcaaagcgtcctaacttagtcattattctggcggatgatttagggtatggcgatctcgccacctacgggcaccgcatcgttaaaacacctaacatagacaaattggcgcaggagggggtgaagtttaccgactattatgcgccagcgcctctgtgttctccttcccgcgcgggcctgttaaccggtcgtatgccgttccgtaccggaatccgttcctggataccggaaggcaaagatgttgcgctggggcgtaatgaactgactatcgccaatctgctaaaacagcagggctacgatacggcgatgatggggaaattacacctgaatgcgggcggcgatcgcaccgatcagccgcaggcgaaagacatgggctttgactatacgttggttaatccggcgggatttgtcaccgatgctacgctggataacgccaaggagcgcccgcgctatggcgtggtgcatcctacggggtggattcgtaatggccaacatattggccgcgcagataagatgagcggcgagtttgtgagctctgaagtggtgaactggctggataataagaaagacgataatccgttcttcttatatgtcgcctttaccgaagtccatagcccgctggcgtcgccgaaaaaataccttgatatgtattcgcagtacatgaccgactaccagaagcagcatccggatctgttctacggcgactgggcagacaaaccgtggcgcggcaccggcgaatattacgccaatatcagctacatggatgagcaggtcggtaaagtgctggataaaattaaggcgatgggcgaggaagataacaccatcgtcatctttaccagcgacaacggccctgtcacgcgcgaagcgcgtaaggtatacgagctgaacctggccggggaaaccgacggtctgcgcgggcgtaaagacaacctgtgggaaggtggcattcgcgtaccggcaatcatcaaatacggcaagcacattccacaggggatggtaacggacacgccggtatatggtcttgactggttgccgacgctggccaacatgatggactttaaacttccgaccgatcgtacctacgacggtcagtctttagttccgctcctgaaggacaagactttaaaacgccagaaaccgctgatcttcggtatcgatatgccgttccaggacgatccgacggatgagtgggcgatccgcgacggcgactggaagatgatcatcgatcgccagaataaacctaaatatctctataacctgaaaaccgatcgtttcgagacgctcaatcaaattggtaaacagccgcagattgagaaacagctttacggtaagttcctgaagtataaaaaggatattgataacgattcgctgatgaaagcccgtggcgataagccgacgcctgtcacctggggctaatggaataattataaaaaattaagtatgccacttagggcgatgcccacctgatccggtcactctgtgccggatcaggttcttttatttcagggaaggtaatgatgtttgggaaaagttgtcaggtcatggttaaaccgaccggatcggtgtgtaaccttgactgtaagtactgtttttatctggagaaagaaaagctctatccggatcgaaaaaaccattacaaaatgtcggaagagaccctcgaactcttcatcaggcagcagattgccgcacaggatattgatgaggtcatttttgcgtggcagggcggggaacccacattaatgggcatcccgttttatcgtaaagccgttgagtttcagcagcgctattgtggcggcaaaaccatcgtcaataccttccagaccaacggcatcctgatcaacgatgactgggcgaccttcttccgggagcatgattttctggttggcgtctctattgatggcgatgccgcgttacacgatgaatggcgagtgacgcgctccggaaagccgacgcatgaaaaagtagaaaatgcggtgcgttgtctggcgcagcacgacgtagaatttaataccctcacggtggttaaccgtaccaatatgcatcatcctgttcaggtctatcgctacctgaaaagcattggtagccgctatatgcaatttatccctttagttgaacgctgtggggaaaatgggctggcgcagccgcaggataaacatatcgcgatgacgccgtggtcggtcgatagcctgcaatttggtcagtttctgaatgcggtatttgatatctggatccgtgaggatatcggcgatatcggcatccagctatttgaacagacgctggcggcctggtgcggcctgccgccgcaggtttgcgtttttgctcccacctgcggcagcgcgtttgcgatggaaatgaacggcgatgtttataactgcgatcacttcgtatatccgcaatttaaactggggaatatccaccagaagacgctgcgtcaaatgaatcagggcgaacaaaatcgccagttcggcagcgataaacagcgttcaatggcgcaggagtgtcatcgctgtcaatggaagttcgcctgctatggcggctgtccgaaacatcgttttttaccctctgcgtcaggcgcaaccaatcataactatctgtgtgcaggttatcaggcttttttctcgcataccgcgacggcgatgagtgccatgcgaaccctgtatgaaaaaggcatctcacctgcagaaataaagtcaatatttgtttgaaggtagtattcgcagggagtgaatatgttttctcacattaatgtcgatgcttgcaaaacgccaggctgcaaaaatctggggattctggggagcccagactatctaccgcaagggaaaaatgttctctgtcgagcgtgcggttttttgttccccattatctcagccagatcgcttaatctttttcgccaggcggcgaatcaaccctggaaaggtctggtgaagtcctgtccgcattgtggcgggacgtcgctgaaaaaatatggattttccactaaaggtgaacggcgtatgtattgccgccagtgtaataaaacgttcatctcctataccgctatcaggagcgacgccagacaagagaaccttgccacgttgattggcgaaggagcgtcgctagttgaaatacgcgcggcgctggcgatagacagcacgggttttagccgcgaattacaaaaactgtcccgtcgcgctaatcaagcggaacgcgattttgtgtttcccgcgtttgatatcgctatgagcacgcgggcgtttcgtgtgaaatttaacggcggcgacagcagcttatacgtgctggtgacggcggaagaggagagcggtaaggtcgtcgcgatctcaacgaattactccgcccaaccggtggaagcggattatcaatatcattctgattacgaagaacgacttccgtccggcacgctggcgcatctggtgcagcgaaaagaggcgctgaccatgcgccgcaatgtattatttgatgtggattacggccccgccgttttatataaaaacgatccggggatgttagtaaaacccgtattacctgcttatcgacattttgagttggttcaggcgttgacggatgagcgttccctgaatgtccaacattatctcgatcacgaatgcttcattctgggcggctgtatgatggcgaattttagctatcttcgtcaggggcgctgtcatatttcgtttgtgcgtgaaagaggcgttacgccgcccaaacgcgatctccctccgcggttgtttttgagcggcggaattcgcaacaacgtctggcgtacattttccacacgggattatgcgatggcggtatgcaatctcacaggaaataaaaaggtgagtttgttacgccatgcgacgttaaatagcgcgacggcgtttattcgctatgttcacaaccatcccttcctgccgcatcttaaccggatgtctcctggcaatgttgttgccgtactggattacctaaaatttgaatataacgcttcacgtaactgaattgctaaaataaaaagtgtgatgaggtgttgttgcggtattttattcggacggcttaaaaatccagagtattaattttcgtggtccccatgaggggcgatgagattaatacactggagatttatcatgaatacgttaactacaacgtctgttgtccttcctgcgccgcgtccggcgattaatcagggtatcgatatcaataatgaaatggtgcttaaccataccgctatttatgaaaattgccttgcgcaggtcacgcaagagaatacggtagaaaatgcgctcatgttgttagacccttacggcacggcgcctttaagcgcttatgccggggtctggagtctggaaccggctgagatcatagtcacggtccaggatgcggcaaaaacggcgatgccggtagaacatctttacacccttacggcaggcgcaaatctgttgccggttctggggctggtagcggatactgaaaaccgtattgtcttttctcaggcagatacgccgcttgccgtctatacgctcatcacacagccattaccgccggtagattccgcggaggtcgtattaggttttccgattatcaacgtgacgcaacctgctaccgatgcgaacaagatggcgccagggttttattttattacgcatttcgatcgttataattacgcattagatcagaatggtctggtgcgctggtacgttactcaggattatccgtcttataattttgttcgaattgataatggccatttcctcactacttcagaagcgaaaaatacctatctggatatgtatgagttcgacatgatggggcgtcttcacacattctataatctcgataatcaatttcaccattctatctggccgtgggatagcaataccattgttgcgccctctgaatatacctcgggtcggcccgacgatttgaaaaccaatgaagacggcgtatcggttgtcgatctgactaccggactggagacggcttactacgatatggcgaaggtgctggatacgacgcgggtttcccgtccttcaggtacggcgccgggagaagacccgacggttaaagactggctgcatataaaccagagctacgtgaatgagacgaatcagttgttaattgcgtccgggcgtcatcagagcgcggtgtttggcgtcgatctgcaaacgcaagcgctacgctttattttgtcaacgcatgaagactgggacgacgcttatcagccttatcttttaaccccggtcgacagtgaaggtgtggcgctttatgactttagcaaacaggaggatatcgacgcggccgaccgtgacttttggacttggggccagcataacgtcgttgaaatcgccaataatacgccgggtatagtggagtttatggtatttgataacggtaactaccgttcgcgtgatgacagcaaaagcctgttaccgccggataactacagccgcattgtccatttcgtggtgaatatgaatgagatgaccgttatgcggccatttgaatacggcaaggagctgggcgcgcgtggctacagtagctgcgttagcgcgaaagcgatccagcagaatggcaatattgtggtgcattttgccgactgcacgtttgatgaaaatggccgcgccatctcttgccagcctggcgagagcgatattatcgatccgcaggcgggcagtgaggcgatggggctgctaattttacaggagattgcgcctacggagaaaaccgtgctttttgaagcgaccatgacgtcaggttactacaaaaacgcggaaacgaacggggaaggctatcgctacgatattaccagtttccgggtgtataaaatggatctgtacgcgtagcggtctatcatcaatgactgactgcactaaaaaagtccggcgtaagtcggacttcatttcgtaaaaaacgagctattcatcatatataatctaattttaacgatgagtcaggcgaggtaagatagtagatccgaagaattcacctgattgagagaataaaaagtgaaacatctgcaccgattttttagcagcgatgcctctgggggcatcattctcatcatcgccgctgcgctggctatgctgatggccaatatgggcgcgaccagtggatggtatcatgattttctggagacgccggttcagctacgggttggggcgcttgagatcaacaaaaacatgctgttgtggatcaacgatgcgctgatggccgtgtttttcctgttgattggcctggaagttaagcgcgaactgatgcaaggctcgttagccagtctgcgccaggccgcttttccggtgattgccgccatcggcgggatgattgtaccggcattgctctatctggcctttaactactccgatccggtcactcgcgagggctgggctattcctgccgcgacggatatcgcctttgcgctgggcgtgttggcgctgttgggcagccgggttccgctggcgctgaaaattttcctgatggcgctggcgatcatcgatgatctcggcgccatcgttattatcgcactgttttataccagcgatctttctatcgtctcgctgggcgtggcggcgttcgcgattgccgtgctggcgctgctgaacctgtgcggcgtcagacggactggggtatatattctggtcggggcagtgctgtggacggcggtactgaagtccggcgttcacgcgacgctggcaggcgtcattgtcggtttctttattccgctgaaagaaaaacacggtcgctcgccggcgaagcgtctggagcatgttctgcacccgtgggtcgcgtacctgatcctgccgctcttcgcttttgcgaatgctggcgtttctcttcagggcgtcacgattgacggtctgacctccatgctgccgttgggaattattgccggtctgctgattggtaagccgctggggattagcctgttttgctggctggcgctgcgtttcaagctggcgcatctgccacaggggaccacttatcagcaaatcatggcggtcggcattttgtgtggcattggctttacgatgtccatctttatcgccagcctggcatttggcaatgtcgatccggaacttattaactgggcgaaattgggcattttgattggttcattgctctccgcagtggtggggtatagctggttgcgcgcgcgtttgaacgcgccggcataatcagtacgaaggaaagggggagcgatgtatcgctcccttgcgacattgaacagggagagaaatgagcatgtctcatattaactacaaccatctttattatttctggcatgtctataaagaaggttctgtcgtgggtgccgcagaggcgctttttctgacgccgcaaaccattactggtcaaattaaagccctggaagagcgtttacaggggaagctatttaaacgtaagggacgcggtcttgaacccagcgaactgggcgagctggtttttcgctatgcggacaaaatgtttacgctaagccaggagatgctggatatcgtcaattaccgcaaagaatcaaacctgttgtttgatgtcggcgtcgccgatgctttatccaagcgtctggtcagcagcgttctggatgcggcggtggtggtggacgaacccatacatctgcgttgcttcgagtccacgcacgaaatgttgctcgaacagctcagccagcacaagctggatatgattatctccgactgcccgatagattccacgcagcaggaggggctattctcagtcaaaatcggcgaatgcagcgtcagtttctggtgtacgaatccgcttcctgaaaaagcgttccctgcctgcctggaagagcgacggttgctggtgccgggacggcgctcaatgctggggcgtaagttgttgaactggtttaattcacaggggttgcaggttgagatcctcggtgaatttgatgatgcggccttaatgaaggcgtttggcgcgacgcacgatgcgatttttgtggcgccgagcctttattcgctggatttttatgccgatgagtcggtaatagagattgggcgcgtggagaatgtcatggaagaatatcatgcgatttttgccgagagaatgatccagcatccggcggtgcagcgtatttgcaatgcggactactcggcattgtttaaactacagtagacgtacctaccgtaatacttccggctgcggtattaacccgcagccggaatcattctacaagttcagcaggctacggtactgcccaccttcgcggataaacaccggaattctgttcagtggcgtagcgtactgcagcgtctgccctcctgaatagctttcaccggtcgcaagatccgtccatgtttccccttctggtagccagacatcacgttcgcgcataccttcatgcatgacgggggcgatcagcaggtcaggaccaaaacaatactggtcggtgattgtccaacttgtttcctgttcggggaattcaaagaacagggggcgcatcactggcgtattgtgcttatgggtttcctccatcagcgctttgatatagggcttgagtttttctcgcaacgccaggcaacctgtcagtacctcgcatacttcctcaccgtagctccagacctcgttcggcgcacctgtagggcactgggcgataccatcccgatacggttgtgcgggtaaaatctgcggatcgcggttgccgtgcagacgcatcaccgggctaaagacgccccactggaaccagcgaatcagcaattcatggaatttcgggtcgtgaatattgccaccatgaaaaccgccgatatccgtcgtccaccacggtatccccgcgattcccatattgagtccggcagcaaactggttgcgcagcgatctaaacgaggagtgaatatcccctgaccagaccagagcgccgtacttctgactgccggcccaggcgcagcgtagcaggttgataacctggtcttcgccatcggctttcatgccgtcaaaaaaggttttagcgtacatacgtgggtagatattgcccacttccagtaccggcccggcatggtagcgatagttgtcgtagtcgtaaacgctgaactcaggttcggcttcatctaaccagaataacttcacgcctttatcgtaatagttgcgtttggctttgccccagacgtagtcgcgcgcgcccggatgagtcgcatcaaagtaagtggtattgccgaggaaatccatattgatcggcaagccacgttccgtttgtaccagccagccgttttcgcgcatctcccgatagctttcggtacggttatccaccgtcggccagacggagaccatcagctcaattcccagcgatttcagctcggcaatcatggcatcaggatcgggccagtcgcgcgcatcgaacatccagtcaccctgattcggccagtgaaagaagtcgattacgatcactgagataggcagattgcggcgcttatattcgcgggcgacctccagcagctcttcctgcgtacgataacggagtttgcactgccagaagcccatggcgtagtccggcatcatcggcggtgtgccggtagccagcgcgtaagcccggctaatttctgccggggtatcgccagccgtgatccagtagtccagctgttcgctgacctgcgcttcccattcggtaacgttttgggcaaaggttacgcgtccgactgccgggttgttccataaaaatccgtagcccagactggagagcataaacggtactgaggcctgggagttacgttgcgccagctcaagcacgcatcctttgagatccaggttggcctgttgatactgccccatgccataaattttttccccttcggtggcttcgaagcgggctttcagtgaatatttcccaccctgaatagggcggaactcgcgtccctcaaggttgagtgcgctgacgtactggccgtgagatgattcatcctcgccaatttcgccccgcaggcgccagaactcctgcaacaggggtttgtgtggatggcggtaaaaggtaacctgtcctttttgattgacgatagcgataattttgccgttggtcagcgttgcctggtggtgctcataatcaatgtggcactgactttctgcgactggctcagtcaatgcccagtcttcatttctcattaccggcagatgacggccgctgcgtacgcgcaggctgttctcgccccagggttcaatccataaatagcgatcgttttgctgccagaccagacgacgcgggtcttgttgcataaatggcatggtggtgcctcccatattcgagggtgaaggtaaagaacgttatgagttgacggtttccagatcgtggcgaatcttctcttccatcgcttcgtatttgcgaaagaaaagtagtgggatcgctgcgagcgcgaagagtagggcgggtgcccagataaaggcccagataatgccctccagacccgcagcactctgggcatggttggggacatagccaaaactgttcatgatccaggcggcgaaagcggtgccgaggccactacccatcttgatgcagaaggtactgccgaaggcgataagaatgccggtagccttaataccggtcttccaggcgccaaaatcaacggcgaagcccagcatggcaaatggcattgagcaggcgataccgctgccgatattgccgagtatccaggcggcgatgaggaaagtaatgttgtccgctgccagccacatcatgacgccgccaaacgtggcgaccagcagaccgcctacccatatccaggttttagccaggtatttgctaaagaaggggatagcgatgataaacaggatctgaatcgtcgccaggctgttaatcagcggtaccagatctttacggtcgaggttgtaggtcagataatagacaatggtcgtgttgcgctgctgtagggcaatccagaagatcagattagccagcaccatcaggatccacggccagttacctttcatcgccgcgaaactttttttcatcggcaacttaggttcatgctgtattttatccgtatccatttcacgaatgtttttaaacgcaaagagcgttagcgcgcaggatataatggcaaacgtaattgccgtataaataaaaccagcgtgatcatcaccgttacctaaaaaagcgactaacggcaaggcggtcgcgttcattaataaaaccccaatttgcccaccggtcattcgccaggaatttaaaaccagtctttctttgggagataaggtcatcaggggtaatattgcactgagtggtgtattaagtccggtaaatagaatgctggcaatcatataagatattgctgcatagatggcttttcctgtcatactgatatcaggagaccaaaatgacagcgcgctgaataccgcaaaaggcagcggtaaccataaaaaccagggacgacatttaccgtagcgtgaacgtgttttatcgatgatgatcccccatatgggggcgtctatgccatcgataatacgcgccagcagcaggataacgcctgctacggcaaggctaatgcccgcaacgtctgtgtagaaatataaaatgtacgttgaactgaagcagtacagcagattacccgccacatccaaagagccgtagctaatacgctgtagtaaagacaatgatgctgacccggaaggctgggtatcctcaatgacagaactcataatgataactccgatattggtacgatacgcccagaaaaacaacctctactttctaagcaagttttgaatattatttttatgtcgtttctgaatttaacctcagattaaaatgagtaagtaaggtgtacatgaaaagtagttaacccgacggcatcaatcaattattaaatcttacatcaggattgcgtttattagtttttgaatgagcgatgtttttatttgctaaggtggtcacagttttttcagtaatgaaataagaaaaggaaaacagtgaaagaaaataactttcaagtattacgtgactaagggaggggtagctgaaaaaataggctggtcaggaagagcgtgaacgagtgaggtcagagccagcggttgtcgagcaaaacggcagatagcaggcataaaaaaacccgctttacgcgggtttttctacaaagctgataacaagcaggcgattaagccagtttgttgatctgtgcagtcaggttagctttatgacgtgcagctttgtttttgtggatcagacctttagcagcctgacggtccacgatcggttgcatttcgttaaatgctttcagtgcagcagctttgtcgccagcttcgatagctgcgtatactttcttgatgaaagtacgcatcatagagcgacggcttgcgttgtgcttacgagccttttcagactgaacggcgcgcttcttagctgatttgatattagccaaggtccaactcccaaatgtgttctatatggacaattcaaaggccgaggaatatgcccttttagccttcttttgtcaatggatttgtgcaaataagcgccgtttaaattgcagcactcgttgcgtagtgatggcgcaggattctaccagcttgcgtgctgtgaatacagcctttccatgagaaaaattgcattaagcggcgggttttggggcggagtttgccgcatggcgatgaaaagcatcttctttatgtttcatcagggcaatcgccggttaaccttaaccgctgtacaaggtatactcttgcgattttcactgttttgagtcagacatgaagctgatacgcggcatacataatctcagtcaggccccgcatgggtgtgtgctgaccattggtaatttcgacggcgtacatcgggggcatcgcgctctactgcagggtttgcaggaagaaggacgcagacgcggtctgccggtggtggtcatgattttcgaaccgcagccgctggagctgttcgcgacggataaagcgcccgctcgcctgacgcgcctgcgtgaaaaactgcattaccttgcgcagtgcggcgtggactatgtgctgtgcgtgaaattcgatcgccgctttgccgctttgacggcgcaaacgtttatcagcgaactgctggtggagcgacttggcgtgcaatttcttgccgtcggcgatgatttccgctttggtgctagccgcgcgggcgatttcttgttattacagaaggcgggggcggagtatggttttgcggtttccagcacccaaaccttttgtgaaggcggcgtgcgtatcagtagtaccgcagtgagacaggcgctggcggaagataacctggcgcttgccgaaagtctgctgggacatccctttactatttccgggcgtgtcgttcatggcgacgagctgggacgtaccattggcttcccgacggcgaacttaccgctgcgccgtcaggtctccccggtcaaaggggtctatgcggtggaagtcaccgggcttggcgataagccgttacccggcgtagcgaacattggcactcgtccaacggtggctggcgtgcgtcaacaactggaagtgcatctgctggacgttgtaatggacctctacggtcgccatatagatgtaatactgcgtaaaaagatacgtaatgagcagcgatttgcgtcgcttgatgagctaaaagcgcaaatcgcacgcgatgagttaacggcccgcaagttttttgggctagccgggcaggtgtaaccctgacggtgtttatcaaaccgaaatacggaaccgagaatctgatgagtgactataaatcgaccctgaatttgccggaaacagggttcccgatgcgcggcgacctcgccaagcgtgaaccgggaatgctggcgcgttggaccgatgatgatctgtacggcatcattcgtgcggccaaaaaaggcaaaaaaaccttcattctgcatgatggccctccatatgcgaatggcagcattcatattggtcactcagttaacaagattctgaaagacattatcgtgaagtccaaaggactgtcgggatttgactcgccttacgtgccgggctgggactgtcacggtctgcctatcgagttgaaagtcgagcaggagttcggtaagccgggcgagaaattcactgccgctgaattccgcgccaagtgccgcgaatatgccgctacgcaggttgacggccagcgtaaagacttcattcgtctgggcgtgttgggcgactggtcgcatccgtacctgaccatggacttcaaaaccgaagccaacatcatccgcgcgctgggcagaattatcaaaaacggtcatctgcacaaaggcgctaagccggtgcactggtgcgttgactgccgttccgcgctggcggaagcggaagttgaatattacgacaaaacgtcaccgtctatcgacgtggcgttccgcgccgtcgatcaggatgcggtgaaagcgaagttcggtctgccgggcgtgagcggccctgtgtcgctggttatctggaccaccacgccgtggacactaccggctaaccgcgccatctccctggcgccggactttgattatgcgctggtgcagattgacggccaggcggtgattctggcgaaagatctggttgaaagcgtcatgcagcgtattggcgcggctgaatacaccattctcggcaccgttaaaggcgcggagctggaactgctgcgctttacccatccgtttatgggctttgacgtgccggcgatcctcggcgatcacgtcaccctggacgccggtaccggcgcggtacataccgcccctggccacggcccggatgactatgtgattggtcagaaatacggtctggaaaccgctaacccggttggcccggacggcacttacctgccaggcacatatccaacgcttgacggtgttaacgtcttcaaggcgaacgatatcgttattgaactgctgaaagaaaaaggcgcgctactgcatgtcgaaaaaatgcagcacagctatccgtgctgttggcgtcacaaaacgccgatcattttccgcgcgaccccgcagtggttcgtcagcatggataaagaagggcttcgtcaacagtccctgaaagagatcaaaggcgttcagtggatcccggactggggtcaggcgcgtattgaatcaatggtcgctaaccgtcctgactggtgtatctcacgtcagcgtacctggggcgtaccgatgtcgctgttcgtgcataaagaaacgcaggagctgctgccgattgagcgtactctggcggcgatggaagaggtggcgaaacgcgttgaagttgacggtatccaggcgtggtgggatctcgacccgaaagagatcctcggcgaagatgccgatcaatacgagaaagttccggatacgttggacgtttggtttgattccggttccaccagttactccgtggttgatgcacgtccggaattcgccggtcatgctgccgatatgtatctggaagggtctgaccagcatcgcggctggtttatgtcctccctgatgattagcgtggcgatgaaaggcaaagcgccataccgccaggtactgactcacggcttcaccgtcgatggtcaggggcgcaagatgtccaagtccatcggtaacaccgtgtcgccacaggatgtgatgaataaactgggcgcggatatcctgcgtctgtgggtggcgtctactgactataccggcgaaatggcggtctctgacgaaatcctgaaacgtgctgccgacagctatcgtcgtatccgtaataccgcgcgcttcctgctggcgaacctcaatggcttcaatccggccaccgatatggtcaaaccggaagagatggtggtgctggacaggtgggcggtgggctgcgcgaaaacggcgcagcaagagattctgaaggcatacgaagcttacgacttccatgaagtggtacagcgcctgatgcgcttctgctccgttgaaatgggttcgttctacctcgacatcatcaaagaccgccagtacaccgcgaaggccgatagcgtcgcgcgtcgtagctgccagactgcgctgtatcatatcgcagaagcgctggttcgctggatggcgccgatcatgtccttcacggctgatgaaatctggggctacctgccgggcgagcgtgaaaaatatgtcttcaccggcgaatggtacgacgggttgtttggcctggaagagaatgaagaatttaatgacgcattctgggacgatgtccgctatatcaaggaccaggtcaacaaagagctggaaaatcagaaagccaatggcatcaaatcgaacctggaagcaaaagtgacgctgaaatatgctgacgatgctaacggtacgatcaagaagctgaaactgttgggcgaagaggtcagatttatcttcattacttcccagttcgtgatttctgagcaagcggggggtattgatgatgaaaatattcagtacaatgctggtaatacgacagttcaggcagtggtaacgcgtgccgagggtgataagtgtccgcgctgctggcactacactactgatgtcggcaaggtggcggaacatgcagatatctgcggacgctgtgtcagcaacatcgccggtaatggcgaacaacgtaaatttgcctgatgagtaaaccactctgttcaacaggactacgctggctatggctggtagtagtcgtgctgattatcgatttgggcagcaaatacctgatcctccagaatttcgctctgggggatacggtagggctgttcccgtcgcttaatctgcattatgcgcgtaactacggcgcggcttttagcttcctggcggatagcggcggctggcagcgctggttctttgccgggattgcgatagggatctgcgtaattcttttggtgatgatgtatcgctcgaaagcgacgcagaagctgaataacatcgcttatgcgttaatcatcggcggcgcgctgggtaacctgttcgaccgcctgtggcacggctttgttgtcgatatgatcgatttttacgtcggcaactggcatttcgcgacgttcaaccttgccgatagcgcgatctgtatcggcgcggcgctgatagtactggaaggctttttgccgaagccgacagcgaaagaacaggcataagcgtaaataccgggtggcgcttatccggttttgtaggtctgataagcgcagcgccatcaggcaaacgtggtgccggatggcggtgaaaacgccttatccggcctacggttttatcgtcctttgtgcctccgggcaaaacacgtgagcaatttgcatgtctaaatccgtacagagcaacagcgcgatcctcgttcacttcaccctgaaactggatgatggctcaacggcggaatctacccgcaataacggcaagccagccctgttccgtcttggcgatacctcgctttccgaaggtctggagcagcagcttctggggttgaaagaaggggaaaagaaagcgttttcgctggagcctgacgccgcgtttggcgtccccagtccggacttgatccagtatttctcgcgccgtgagtttatggcggcgggcgaaccggaagtcggggcgattatgctttttaccgcaatggatggcagcgaaatgcctggcgtgattcgcgaaatcaacggcgactcgattaccgttgattttaaccatccgctggccgggcataccgttcactttgatattgaagtgctggaaatcgatccggcgctggaggcataaacatgcagatcctgttggccaacccacgcggtttttgcgccggggtagaccgcgctatcagcattgttgaaaatgcgctcgctatttacggcgcgccaatttacgttcggcacgaagtcgtgcataaccgctatgtagtggacagcctgcgcaagcgcggggcgatctttatagagcaaattagcgaagtgccggatggcgccattctgattttctccgctcatggggtttcccaggcggtgcgtaacgaggcgaaaagccgcgatcttaccgtttttgacgccacctgcccgctggtgacgaaagtccatatggaagtggcgcgcgccagccgtcgcggtgaggaatctattctcatcggccacgccgggcacccggaagtggaaggcaccatgggccagtacagcaacccggaaggggggatgtacctggtggagtcgccagaggacgtctggacgctgaatgtcaaaaatgaaggcaagctctccttcatgacgcaaaccacgctttccgtggacgatacgtccgatgtgattgatgcgctgcgtaaacgctttccgaaaatcgtcggcccgcgcaaagacgatatttgctatgccacaactaatcgtcaggaagcggtgcgggcgcttgcggagcaggctgacgtagtgctggtggtcggctcgaaaaactcttctaactctaaccggctggcggaactggcccaacggatgggaagaaccgcgtttcttatcgacgatgcggcggatatccaggaggcgtgggtgaaagaagccgcctgcgtcggcgtcaccgctggcgcttccgcgccggatattctggtgcagaatgttattgcgcgtctgcgcgagtttggcggcggcgaagctgtcacgcttgaggggcgcgaagaaaatattgttttcgaagtgccgaaagagctgcgtgtggatgttcgtgaggtcgaataagatttcacaattcagaaatctgcctgatgacgctacgttgaccagatcttaagaatttcttttgatattcaatgtgcgacaggaagaataaggcgtagtcgtcatccgttgctaatgccccacctttttgctattcatctgaaaaaccagcacaatcgttgctggttttttggttgtaatgcctacagggataagggaaatgggcaaaataaaatatggattgccaacgttactcgccatcggcttttggatggacgcaacaagcgccacggtgctggagctacctgcctgggagcgaaactataccgggactatcgcggggaaaccggtaaacgttaatatcacgcgatttggtaactctcttaatgggtattactgctatgaaccttgcaatcagcacaaggcagtgattgttctacgcggctcactccaggataaagaggtgcatcttgaagaacgcgtaaaggcgctttcgggttactggaatgcggaaatctccagcagtgagattaaaggcgaatggacgtccgcagataaaaaacgacattttcctgttgcccttatctattacaaacctaaaaactcccctgatattgtgctggtcacgaacacgaatgatgcagggggttacgacccttccaaagagattgattgcggcaatacgccggccatttcggcgataaaattataccgtgatggtaaactcatacagaccttagataccgcctcggtgggcacttgtagcccgtttatgcctcaatggggggatgtcaattttgatggctacccggatctgtcgattgtaacagagttacttgctgggccggatgctccagttcaaacatggctctatgaccccgccaaacagcgttatgttgatgcgccagcgtcttatcaggaaatcacttcaccagagatcgatgctgaacataaacagattgtcagctattggcgcggcggttgctgcagccatggcgtcaatgtgtatcgctggaaaggaaaaacgattgaactgatcgatcgcggtgaaagctactttcagcctgtgatcagtaaaggcaaaatgtataactgctacatgacaccttcctacgctgatgggcgtattatttatccgctagtacgtaaaaatggtcatttgacgccgcctcttagccttgatgggacgtgtcaatctttttggctaaccggtaatgttcgtaccgtgattcaggcagaaaaacccggcgctgagcccgaatcgcttgagattcagtggcaggaaaacaaagcatcgccagggcgtttttgcccattagttccgtttgtcgaaggtgataagctaagtccgcgtctggtgacggatgacgatgtgcctgatgcctgtatcagtcgcgctgagtatgaagatataaaacaataggtcaggagagcattaatgacagcatccctacacattattcttgataccgatccgggcattgatgacgcggctgcgattgccgctgcgctgttcgccccccagcttgatctgcaactaataaccaccgtcgcaggtaatgtttccgttgaaaaaacgacccgtaatgcgttgcagcttctgcatttctggaacagcgatatcccacttgcccagggggccgcgacaccgctgctgcgtccgttacgcgatgcggcatacgtccacggcgaatccggtatggaaggctatgattttgtcgaccatcagcgccaaccgttggcgaagcctgcgtttatcgctatccgggatgtgctgatgaacgccccggagcccatgacattagtggcgattgggccattgaccaatattgcgttgctactgatgcactatccggagtgtgcgtgtaacattcgccgtctggtgttgatgggcggttccgcagggcgcggcaattttacgcctaatgctgaatttaacattgctgtcgatccggaggccgcggcgctggtgttccgcagcggtctggagattgtgatgtgtgggctggacgttacaaatcaggcaatgctctcgccagattttctgaataaactgcccgcgctgaatcgcaccggtaagatgttgcacagcctgttcaaccattatcgcagcggtagtatgcgcactggcgtccggatgcacgatctctgcgctatcgcctggctggtgcgtccggagctttttaccctgcaatcctgttttgtggccgtagaaacgcaggggcaatataccgccggtaccacggtggtggatattgaagggcgtctggggcagcccgccaacgcgcaggtggcgctggcgctggatgtggacggttttcgtcagtgggtggctgaggtgtttgcctatgcgccgtaattacatgttggcgccataatctcatactttgccgcgatagagtctctccggcctgcccactttcccgtagctgatctccgcttcgagaaagttatttttcacgccttgttccagatagcgtcgggcagtggttttactgctgcccagaatttgcgccagagtgtctgctgtatgtactgcctgcgggtcggcgaatatttgtcgtacccggttgaaggtgttttcatcaattccccgcagtccgctattcggttctgcggtttgttctttggcctggatattaaataaggcatcaacgtgcgtctggtttgcctgctcactggaacgtaacgaactgcggtaacgggtgaaccgctccagggtatgctgcaggcgctgataatgtaccggcttaatcaggtaatcgaatacgcccatgcgtaaggcatcgctgatggtatccatatgattgtcggcggtaatgaaaataattcgccccgtgtagttggtgctgatggtatgacgaattaaatcgatccctttgccatcgggtaaaaaattatccaatagaattaactgtggttgatagaggcgtatttgcttcttcgcactttccagtttgtctgcgatgccgacgattgaaaactggggaaaaatcttgatggtgtccaccaggatttccgctagcatcggttcgtcttcaacgatgagtgtcgtaatgctatccatgttattcttctctggtaaaagggatatagagggtaaaaatggtgccaaaaggattattgttatcgacgataatgtcaccattggcctgcttgacgtagctgtgcaccaaccataatccaattccgtgatcgccgttgttgtgggtggtcactccacgctcgaaaatatgctggcggatattttcgtcaataccacatccctgatcggcaacttcaataatgacttcattaccttcgctgttgatcaggcactcaatctgtcgcgagccttcgcgattgagcagggtggcgttataggcgttgtccaataaattgccaacaatcgaaatccattcattatgcgagagcgatgacggcaggtgttcaacaaagcttgaaggatcgaaaatcagctccagccccagctcttttgcccgataatatttaccgattaatagccccgcaaggtggtggtcgcggaaattatgggaaataaaatcgagtactttctggtggctttccgactgctgctgaatcagcgccagcgcattatcgtagcgcttcaggaacagcagtccggcaatggtggaaataaggttgcgatgctcatgctgcacggcgcgcaggttatcggcgtattgccgcacctgacttaactgcaggctgagtgtattgatatcgtctttgttgcgaaagctaataacccagccctgaggctggttgtcaataatgaccgccatgcgactggcgatgactttcatttggttaaaggtgacgatctcatcttttttgtttttttgcggcgcatcgtaaaagaaggcctccggcaacacgacatggtggattgcatagccaatgagttcagactccggttggctcagattcagtaagcggcgagccgtttggttaatggcggtaatacggtgatgggagtcaatggcgatcaacccttcaaataccgactcaaataacacgctttgctgaattaatagttgtgaaagctgctgcggctccatgttaagcatctgctttttaatatgcagcgagaagcggcgggcacagtacaacagtaccagcagcagtaacgccatcgggaacagcaacgagctgatttgtaagttaagccagctctccaactgttccagagtatagccgacggaaacaataccgatgactttaccggtactgtcctgaatcggggatttaccacgtagggaagagcctaatgaacctttgcgcaccgatacgtagcttttagcgttatacagcgcgtcgtcgctatcgccgccctccatatatttgccgatctcatccgggttgacgtgatacagtcgctgacctttttcgttgccaacggtaatgtaagtcgcatccgaaaacgagcgcattgggtcaatcaacgctttgatgcgtgacaaatcatgcgcttctacggcttcaactaattctggcatagcggatatttgcattgcctgaataagcgcacgttggcccacctgataatgcaggcgttctttcgtgatatcggtcagataccaggtgattgccagcatcacgatggtggatgtaaacaggatcagtagaaatatccggttttgaaacgagtgtctggcaaaccagcgtgtaatttcccgtataaacatattggtatttaaatatttaattacggtattttcttgcattcggcatcaccggaacctgaaccagttcatacttacttttctttcagaaaaaatttggatgaaaatgggatacgacatgcgtatcccatccactattacatcgccagcacgtatttcagcatcacgcccgcggcaatggccgagccaatcacccccgccacgttcgggcccatcgcgtgcatcagcaggaagttctgcgggtctgattccagccccactttgttcgatacgcgggccgccatcggcaccgccgagacccccgccgaaccgataagcgggttgattttgttcttactgcacaggttcagcagcttcgccatcagcaccccggccgccgtcccgataccaaacgcaatcacccccagcagcagaatgcccagcgtctgcggttgcaggaacttatccgcgaccagcttcgcgcccaccgacagcccgaggaaaatggtgacgatattaatcagcccgttctgtaccgtgtcgctcagacgctccaccacgccgctttcgcgcatcaggttgccaaaacagaacatccccagcagcggcgccgcgtccggcagcagcagggccaccagcatgagcagcaccaccgggaagaggattttttcccgcttactcaccgtgcgcagctgcaccatgcggattttccgctccgtctcgctggtcagcgccttcataatcggcggctggattaacggcaccagcgccatatacgagtacgccgccaccgcgatggcccccagcagctccggcgccagcttgcccgacaggtaaatcgccgtcgggccgtccgcgccgccgataatgccgatggccgccgcctgcggcagggtgaagctgataaggccgaagtagttcagcgtcagcgccccgagcaccgtggcgaagataccgaactgcgccgccgcccccagcagcagggtgcgcgggttggccagcagcgggccgaagtcggtcatcgcgccgacgcccatgaagatgaccagcggcgcgacaccggaaccaatcgccactttgtagaacagcgccagtacgccaggcgtgtagcccatgtccaccgccaggttctccatctggccctgcaccgacggtagcgccagcgctaacgcctctttaatggcatgcacgtccggcgcgcagttcagcttcgcggcaatcaccgccagttgcccggcgtcgtggtgcgccagcaggctttccagcgcggtcagcgccatacccgcttccgggatgttggagagcagcccgccgaagccaattggcagcagcagtaacggctcgaacttcttcgcaatcgccagccacagcagcagcaggctcaccagcagcatgatggcctggcctgcgccaaggtgcatcagccccatgccctgaagcagggcgttcagactttccatttcagttctccgttacgccagcgtcatcagggtgtcgccgacggagaccgcgtccccggacttcaccgcgataccgcgtaccgtcccggcctgcgcggcgcggatttcggtttccatcttcatggcttccagaatcagcagcacgtcgccttcggccaccgtctggccctcggtggcaatcaccttccagatattccccgccagcggcgcggtgaccggggtgccggcgcctgccggggcggcagcctgaaccggtgcggaagaggccgccggaacagccgcagtgagctggctgatatcgccgccgtcgctgaccttcaccacaaaggctttgccttccacttccacggtgtagataccggaggcggcaggcttctctgcttttgccaccggctgcgcggcttccgcctgcggcagtggctcaaacgccgccgggttattgcggttctcaaggaatttgaggccgatttgcgggaacagcgccacggtgagcacgtcgtcgatggcgtttcccgccagagtaatccccttctcctgcgcctggcgcctgacgtccgcttccagttcagccagttccggtttgagtaaatccgccggacggcaggtcaccggggcgcccccttccagcacgcgggcctgtaacgcggcgttcaccggcaccggggtgtggccgtattcgcctttcagaatgcccgccgtttctttggcaatggttttgtagcgctcgccggtcaggacgttgagcaccgcctgggtgccgacaatctgcgaggttggggtcaccagcgggataaagccgaggtcctcgcgcacgcgggggatttccgccagcacctggtcgagtttgtccgccgcgttctgctgcttcagctggctttcgaggttggtgagcattccgcccggtacctgggccaccagaatacggctgtcgtagcccttcagctggccttcaaaggcgtgatactttttgcgcacctcgcggaagtacgcggcgatattttccagcttcaggatatccagcccggtgtcgtgttccgtgccggcaagcgttgccaccagcgcttcggtggccgggtggccgtaggtggcgctcatggaggaaatcgccgtgtccacgccgtcgacgcccgcctcgatagccttcagcagggccatctccgccatcccggtggtggcgtgacagtgcaggtgcaggcgcacctcaaaacgttttttgatttcgctgaccagctcatacgccgccatcggtgtgagaatgccggacatatccttgatggcaatcgagtcaacgccggtttccagcagttgctccgttaaatccagccaggtctgcagggtgtgcgccgggctggtggtgtaactcagggtcccctgggcgtgcgcgccgtggctgcgcaccgcctgtaatgcggctttcatattgcgcgggtcgttcatggcatcgaagacgcggaacacatccatgccgtttttcaccgcgcgttcgacgaagcgctccaccacgtcatcggcgtagtggcggtagccgagcaggttctggccgcgcagcaacatctgcagcggggttttgggcatggcttttttgagttcgcgcaggcgcagccacgggtcttcgccgagaaagcggatacaggcgtcaaaggtggcgccgccccagcactccagcgacccgtagcccacgtcatcgagcgcggcggcaatcggcagcatgtcatcaaggcgcaggcgggtggcgaacagagactggtgggcgtcacgcaggacgacgtcggtaatggcaatggtcatggatccctccgggaaattaaacgtggtggcggtgatggtgaatggcggcggcaatcaccggctttaagcgggtgaagtcgtccacgacgggaacggcgcgcggtgcgggcgcggcgacgggttccgggaagaagcgagtaatcacggcagacatgccgcgaatggcaaagatgagcaggaacagaaagctcagtacgaaccccatccctaaaaacatcagggtgaaaccttcacccagtagtacagcttcgttcatgaatcattttccataatgagaggcacgacggtggccttgacgacaaccttcctggtgaatccggctaaggagtagagtggatttcccttggccacctctggctttggcctctacttttctccaggtcgtttgctgccaagacaccgccgtgcgtttttttacaccatcatgctgaacacgatgctagcgataaccagcacaataccgccgcccagacgagaggaaatttgtgcatatgaaatgaggttcatacggttacaggcggagagcacttccagatcgccggagccgccgcggttggccatacaaagacccgcagtaatggatgattcaatcgggtagaagccaatcaaccagcccccgatagctgcgccaacgactgcgccgaccacaatgattgcggcgataactacgttcgcgaacgtcagggcatcgatgatctcttgcagatcggtgtagcaaacacccacacctaccatcagcacccacagtagctgtttggagaagaagtcagaaagacgtttcgccccggctttaatctccggtgagcaaagacctgatgcgttcagcgcagcaacaatcaggaccatccaggcgaagtagtgaatagagacgccgccgatgcttggcagaattttcttggcaacaacataggccagcaggaagcaggtggtggatagcaccatgccaaccgccgtttcacgatgggtaatctgaccggccttttcatcatcttcggttttgaaggaagccttacgaaccaactcgccttcaccgctaagccaggtgtattttttgcctatcatatcgaggagggcggcgaaaataatggcgaagatattcgcaatggtcagaatagcaatagccgttgagtaatactcttcgcgagaacgtccggtaaccgagtgataaatttcagacagaggcacggcgcccgcgccgttaccaccgcccataatcggcagaacgtacagcatcatgatacggtcgaccgggataccgaagcacagaccaatgacgataccgaaaagggacgcgccgacaatcccggcgaggatggttgggatatagcccagcagtgattttaatagcagcttacggtttaccgacaggatcgcgcctgtgatcaacactgcgataaacaggttaaggaagttgcttttatccattacgttgctgatcgcatcaatttctttctgcgtaaatatgccagcatagacaaaataagctgcaaccagaaatatcataaccggtgcgccgccaatatatttattgaagatcggtaaacgtttgccgatttcaccaaaaatggcccccatcacaaacataagggcaaaaccacctactaagtcagtcggtatagcattataaaaatgagaaagtaataaagtaattaatgcaaaggcataaagcggtagcggcataccaaagattttgaatctgagtaaatcgctagccccctttttctccgtcgccgaagcctgggtcatgttggtcataaacattttcctgtgtattgatgggtaacaagacccgcgcatactaataaattcaatgaaccatgagatgtgactatcttcactgaatggttgtgtttttaattaatttaattatttttattaactctggttaattaaggaaataaaaaccataaagcttataaaagcaagggggaaagtgtgatgtctattccagacgagtaatacaaacgctggcgaaatatgcgacgttatttgctgacggatgcagaatagagtgaatctaatatttaaacgcatttatttgcaaaaggatgtattgcgtcgcgagtcggtcgccatgtttctggagggcgtgggactcgccctggaagacgattgtgaaatcgcggtatgcgcatattggcagggtgagatagtcgggtgcggttctctggccgggagcgtactgaaatgcatcgccgtttccccggttttacaaggggaagggctcagcctcaaactgctgaccgagctgcttacattggcctacgagttaaaccgcagcgagcttttcctgttcactaagccgcaaaatcggttgctgttttctggcgcggggttttggcccattgcgcaggcaggtgagctggcggtgttaatggagaacagcagtgaacggttagcgcgcttttgtcgccaactggcgctttatcgtcaaccgggaaaaacgatcggcgccatcgtcatgaacgccaatccgtttacattgggccaccgttatctggtggagcaagcggctgcggcctgtgactggttgcatctgtttgtagtcaaagaagatgcttcatttttttcctataccgaccgttgggcgctgatcgaacaaggaatcgcgggcattgacaacgtcacgttgcattccggctccgcttatatgatctcgcgtgcgacgtttcccggctatttcctcaaagaaaaaggggttgtggacgactgccattgccagatcgatctgcaactcttccgtgaacatctggctccagcgctggggattacccatcgttttgtcggcagtgaaccgttttgtcctctgacctgtgcctataaccagcgaatgcacgacattttgcacgatccgaagcgtagcggcccggttattgaggtcgtcgagctggcgcgggtggagaaaaacggcgcggctatttccgcctctcgcgtcagaaaactgtatagcgaacgtaattggtcggcaataagcgcgctggtgcctgctggcaccctggcatatctgcagcggcatgccgccagacacactgaaaccatatgacgtaacaccgttaacaaggaacataactaatgaaaatcattaaagatgccctggcaggcacgctggaatccagcgatgtgatgatcaggattggtccatccagcgagccaggaattcggctggagctagagagtctggtgaagcagcagtttggcgcggcgattgagcaggtggtgcgcgaaacgctggcgaagctgggcgttgaacgcgcgctggttagcgtcgatgacaaaggcgcgctggagtgcattttacgcgcccgagtgcaggcggcggcgttacgcgctgcagaacaaacggaaattcaatggagtgcgttatgagaccacgtcgcagtatgttgtttatccccggcgcaaatgcggccatgttgagcacctcgtttgtctacggtgcggacgcggtgatgttcgacttagaagacgccgtagcgttacgtgagaaagataccgcccgtcttttagtccatcacgcgcttcaacatccgttctatcaggatgttgaaaaagtggtgcgcattaatccactgaacacgccgtttggtctggccgatcttgaagccgtcgtgcgtggtggcgcggatatcgtgcgtctgccgaaaaccgacagcaaaaacgatgtgctggagctggaagcgcaggtcgaacggatcgaacgtgaatgtggacgcgaggtcggcagtaccaggctgatggcggcgatcgaatcagcgaaaggcgtggtcaatgccgtcgacatcgccacctccagcccgcgcatggtggcaattgcgctggcggcatttgattacgtgatggatatgggcaccagccggggcgatggcaccgagctgttctacgcccgctgcgcagtgctgcatgcggcgcgcgttgcgggtattgccgcctatgatgtcgtttggtcggatatcaataatgaagaaggcttcctgaaggaagtgcagttggcgaaagggcttggttttaacggtaagtccttagtgaacccacgtcagattgagctgttacatcaggcttattctccgacacgtaaagaagttgagcatgcgtatgaggtgattgccgccgctgaagaggctgagtctcgcggtctgggcgtcgtttcactcaacggcaaaatgattgacggcccgattatcgaccacgcgcgcaaagtggtggcgctgtcggcttccggtattcgtgattaaggaaggaaccatgaaagagactgtaaccatgctcaaccagcaatatgtcgtaccggaaggattacagccctaccagggggtaacagcgaacagcccgtggcttgccagtgaaacggaaaagcgtcggcgtaaaatttgtgactcgcttgaagaggctatccgtcgttccgggcttaaaaatggcatgacgatatccttccaccatgcgtttcgtggtggcgacaaagtcgtcaatatggtgatggcgaagctggcggaaatgggattccgcgatctgacgcttgcctccagctcattaattgatgcccactggccgcttatcgaacacattaaaaatggcgtggtgcggcagatttacacctccgggctgcgcggcaagttaggggaagagatctccgctggcctgatggaaaacccggtacagatccactctcacggcggccgcgtaaagctgattcagagcggtgagctgaatattgatgtcgctttcctcggcgtgccgtgctgcgatgaatttggtaatgctaacggctttagcggcaagtcacgctgcggctctttggggtatgcgcaggttgatgcgcagtacgctaaatgtgtggtgctcctgactgaagagtgggtcgaattccccaattatccggccagtatcgcgcaggatcaggttgatttgatcgtacaggtggacgaagtaggggatccggaaaaaatcaccgcgggtgcgattcgtctgtccagcaacccgcgtgaactgttgatcgcccggcaggcggccaatgtgatcgaacactcaggttatttttgtgatggtttctcgctgcaaaccggcaccggtggcgcttctctggcggtcacccgtttcctggaagacaaaatgcgtcgccacaacattacggcgagttttggcctgggtgggatcaccggcaccatggtggatctgcatgagaaagggttgatcaaagcgctgctggatacgcaatcattcgatggcgatgcagcccgttcgctggcgcagaacccgcatcatattgaaatttcgaccaatcaatacgctaaccccgcctctaaaggcgcggcatgcgaacgcctgaacgtggtgatgctgagcgcgctggaaattgacgtgaattttaacgttaacgtgatgaccggttcaaacggcgtactgcgtggcgcatcgggcggccatagcgatacggcagcaggggccgatctcaccattattaccgcaccgctggtccgtggccgaatcccatgcgtggtggaaaaagtgctgactaccgtcacgcctggggcaagtgttgatgtgctggttaccgaccatggtattgcggtgaaccccgcgcgtcaggatctgcttgataacctgcgtgctgcgggcgtggcgctgatgaccatcgaacaactgcaacagcgcgctgagcaactgaccggtaaaccgcagccgattgagtttaccgatcgggtggtggctgtggtgcgttatcgcgacggttcagtgattgacgtgattcgccaggttaaaggctgatgaagggcacagacctgttgtacctgggccaggcagttacgctggaggagatgctacaagcgcgcgataaacgtgccgccaggcagcgtcaggcgttgaactgctatcggctaccgttgatttccctcacgctggttgcaccgggcgccgttaaaaactcagcggtctggcggcgtgtcgccgattacgcaattgccgaaatactggcgctttgcgaacagatggagtgggtcaacgtctgggaaatgcaggtaaatgaacgcagcggcccggaatggatggcagcggtctgtgcgccggcaatggcgttgaaacagcacatgtcgacactggagatgagccatccgttagggcggctttgggacatcgacattattgatagcgacggtaagtcgctatcacgccgtgaactcgggcatcctgcccggccatgtttgatatgccagcaggatgctcatctctgtgcccggggcaagcatcacacccttgaccttttgttggatgaaattgcacgaaggattgaatgctatgaacgtgagcgttgtgactgaacggcgtacgccagcgtactcatcgctggcggctggcgaacttaatgggttggttgcaagagcgctgctgacggaagccaggctgacaccaaaacccggtctggtcgatattcgtaattcgggagcgcatagggatatggatctggcggcatttgaacgtagcactaccgccattgctccgtggatggaaaagttttttatcatgggcaacaacacggcggcgctggcggcagaaaatgtcctggtgatgctgcgtccgctggggatggcctgtgagaacgatatgctacaggcgaccaatggtgtgaatacccatcgcggggcgattttcgcttttggcctgctgagcgcagcgattggccgacttctcgcgcggggagaaccgttggagcaaaatcgtatctgcgaccaggttgcccgcctgagtcggaatattgttgcccacgagctctcagcaaaaaaagcgggaaaactgacaaagagtgaaacccatttccagtgttatggcctgtcgggcgcgcggggagaagcggaaagcggttttcgaaccgtcagaacgcaggctttgccggtgtttaaccgggtcgtgcaggagcatgacgatacccatcttgccctactgcaaacattgttgcatctgatggcgtggaatgatgataccaatctggtgtcacggggaggcctggaagggctttactacgtgcagcagcaggcacaaaaattgttgtggcaagggggcgtattggttgaggggggcattgaagcgatgcagtccctcgatgatgaactcatcctgcgtaacttaagccctggcggtagcgcggatttactggcagtgacctggtttttaagtcattttcctgccggttccctctatcctgagtaagtttctcttctttcattctctccagcaatgattcatcctgcgggatgaatcatgtcttttactgatatcgctccctgtttatcattaatttctaattatcggcgattttagatggcggcctccgggcgcgctggttactctgaaaacggtttacgcaatttttacaaaagagaatagctatgcatgaagcacaaatccgcgtcgccattgccggcgccggtggccgcatgggacggcagttaatccaggccgccatggcgatggaaggtgttcagctgggtgccgcgctggagcgcgaaggctcttccttgctgggcagcgatgctggcgaactggcaggggcgggaaagtccggcgtgatcgttcaaagcagccttgaggcggtaaaagatgattttgacgttttcatcgattttacccgtccggaaggcacgttgacgcatctggcgttttgccgccagcatggtaaagggatggtgattggtactaccggctttgacgacgccggtaaacaagccattcgcgaggcgtcacaagagattgcgatcgttttcgccgcaaactttagcgtcggcgttaacgtcatgctcaagctgctggagaaagccgcgaaggtaatgggcgactatagcgatattgaaattattgaagcgcaccaccgccataaagtggatgcaccgtcgggtacggcgctggcaatgggcgaggcaatcgccggggcgctggataaaaatctgaaggactgcgcggtctactcgcgtgaaggttataccggcgagcgcgtagcgggcacgattggctttgcgaccgttcgggcgggcgacatcgtcggcgaacataccgcgatgtttgccgatattggcgagcgcgtagagattacgcataaagcttccagccgcatgacgtttgcaaatggcgcgttgcgatcggcgttatggctaaaaacgaagaaaaatgggctatttgacatgcgggatgtgctggggctggatgtattatagcgactaaataccttcgtgatgtggttgtggtaatcaagattaattgattacaaagggcaatatattattgcccttttgtttttgccccccggttattcggtcagataaataacgcctttcaccattcatgtttcgacagtttcttcgcccacggcatgttctgccgttgttttcgcgttaagaatagtccgtttaaagacatccgggccaacggcatccatttgcgtgacgtaattgccattacgataaatgcggttaattggcccttcagacgcatcggtacgggtcattacgttcaacgggaaaaaattactgcctgaactgacgttagtcatattcagccgcagcgccttaccgtatgcaaaaggcacctcgaccagactgataagactgatatccatcggagggggagtgctgttcctcgggggggcgttttatctcttttgcttcaataggttggcttttttatgctgtagtgaggctggttgtggtccaatcgtatgtgcctgtcttaaagaaaaagaagctggatctttatatcgcgattgtaattcttattacattgtcttaatttgctgttttttgttgattttatgatgcatttgatttgttttttatatttttaatatattgatttttaaaatttttttgtcgttaactttcttgattttgaatttttatgcatttaatggcattgatggctattaagtgagtttttatcgttgttttttgttgttttaatgtcaaatttgaccatttggtccactttttatcatgccagccagttttttgcgaactcaaggaagcgcaagcgttttctatcgtaacttagttgatctttttgcctcttaaacagaataacttccttataatgtgcaaaataacataaaaaacaccctctttaagttgacttttatccggcttaacttcagaatgccgccgtttgccagaaatccacgggtaagcaaatttgcattgcttcatactgactgaatgaattaatatgcaaataaagtgagtgaatattctctggagggtgttttgattaagtcagcgctattggttctggaagacggaacccagtttcacggtcgggccattggggcaacgggttcggcggttggggaagtcgttttcaatacttcaatgaccggttatcaagaaatcctcactgatccttcctattcccgccaaatcgtcactcttacttatccccatattggtaatgtcggcaccaataaagccgatgaagaatcctctcaggttcatgcgcaaggtttagtgattcgcgatctgccgttgattgccagcaacttccgtaacaccgaagacctctcttcttacctcaaacggcataacattgtggcgattgctgatatcgatacccgcaagctgacccgactgctgcgtgagaaaggcgcacagaacggctgcatcattgcaggcgatagcccggatgcgaagctggcgctggaaaaagcgaaagcatttcctggacttaacggtatggatctggcgaaagaagtgaccacggcggaaacttaccgctggacgcagggtagctggacgctgaaagacggtttaccggaagcgaaatctgaggatgacctgccgttccatgtggtggcctatgatttcggcgcgaagcgcaacatcctgcgtatgctggtggatcgcggctgccgcctgacggtggtgccagcgcaaacctctgctgaagaggtgctgaaaatgaatccggacggcatcttcctgtcaaacggccctggcgacccggctccgtgcgactacgcgattactgctatccagaaattcctcgaaaccgacattccgctatttggcatctgcctcggtcatcagctactggcgctggcgagcggtgcgaagaccgttaagatgaagttcggccatcacggcggcaaccatccggtaaaagatatggacagaaacgtggtaatgatcaccgcgcagaaccacggctttgcggtggatgaagactcgctgcccgccaacctgcgcgtgacccacaagtcgctgttcgacggcaccctgcaagggattcaccgtaccgacaaaccggcgttcagcttccagggccacccggaggcgagccccggcccgcacgatgcggcgccgctgttcgaccactttatcgagcttattgagcaataccgtcagtccgcgaaataatcaggagtaataagagccatgccaaaacgtacagatataaaaagcatcctgattctgggcgcgggcccgattgttatcggtcaggcgtgtgagtttgactactccggcgctcaggcgtgtaaagccctgcgcgaagagggctatcgcgtcattctggtgaactccaacccggccaccatcatgaccgacccggaaatggccgatgccacctacatcgagccgattcactgggaagtggtgcgcaaaatcattgaaaaagagcgtccggatgcggtgctgccgaccatgggcggccagaccgcgctgaactgcgcgctggagctggagcggcagggcgtgctggaagagttcggcgtcaccatgattggtgcgaccgccgacgccattgataaagccgaagaccgtcgtcgcttcgatatcgcgatgaagaaaattggtctcgacaccgcgcgttccggtatcgcgcacactatggaagaagcgctggcggttgccgctgacgtgggcttcccgtgcatcatccggcctagctttaccatgggcggcaccggcggcggtatcgcttacaaccgtgaagagttcgaagaaatctgcgaacgcggtctggacctctcgccaaccaacgagctgctgattgatgaatcgctgatcggctggaaagagtacgagatggaagtggtgcgtgataaaaacgacaactgcatcatcgtctgctctatcgaaaacttcgatgcgatgggtatccacaccggtgactccatcaccgtggccccggcacagacgctgaccgacaaagaataccaaatcatgcgtaacgcctcgatggcggtactgcgtgaaatcggcgtcgaaaccggcggttctaacgtccagttcgcagtgaacccgaaaaacggccgtctgatcgttatcgaaatgaacccgcgcgtatcccgctcctcggcgctggcgtcgaaagccaccggtttcccgattgccaaagtggccgccaaactggcggtaggttacacccttgacgaactgatgaacgacatcaccggcgggcgcactccggcctccttcgagccgtccatcgactatgtggttactaaaattccgcgctttaactttgagaaattcgccggtgccaacgaccgtctgaccacccagatgaaatcggtcggagaagtgatggcgattggccgcacgcagcaggaatccctgcaaaaagcgctgcgcggcctggaagtcggcgccaccggttttgacccgaaagtgagcctcgacgacccggaagcgctgaccaaaatccgccgcgagctgaaagacgcgggcgcagatcgtatctggtacatcgccgatgctttccgcgcaggcctctccgtcgatggcgtctttaacctgaccaacatcgaccgctggttcctggtgcaaattgaagagctggtgcgtctggaagagaaagtggctgaagtcgggattactggcctcaacgccgacttcctgcgtcagctcaagcgtaaaggttttgccgatgcgcgtctggcaaaattggcgggcgtgcgcgaggcggaaatccgcaaactgcgcgaccagtatgacctgcacccggtctacaagcgtgtggatacctgcgcggcggaattcgccaccgacaccgcctatatgtactccacttatgaagatgagtgcgaagcgaacccgtccattgaccgcgataaaatcatggtcctcggcggcggcccgaaccgtatcggccagggtatcgaatttgactactgctgcgtacacgcctcgctggcgctgcgcgaagacggttacgagaccattatggtcaactgtaacccggaaaccgtctccaccgactacgacacttccgaccgtctgtacttcgagccggtcacgctggaagacgtgctggaaatcgtgcgcatcgagaagccgaaaggcgttatcgtgcagtacggcggccagacgccgctgaagctggcgcgcgcgctggaagcggcaggtgtgccggtaatcggcaccagcccggacgccatcgaccgcgcggaagaccgcgagcgcttccagcacgcggttgaccgtctgaagctgaagcaaccggccaacgccaccgtcaccgccattgaacaggctgtcgaaaaagcgaaagagatcggctacccgctggtggtacgtccttcttacgtgctgggcggtcgggcgatggaaattgtctatgacgaagccgacctgcgtcgctacttccagacggcggtcagcgtctctaacgatgcgccggtgctgctggaccgcttccttgatgacgcggttgaagtggacgtggacgctatctgcgacggcgaaatggtgctgattggcggcattatggagcacattgagcaggcgggcgtacactccggcgactccgcctgttccctgccggcctacacgctgagccaggaaattcaggacgtgatgcgccagcaggtgcagaagctggccttcgagttgcaggtgcgcggcctgatgaacgtgcagtttgcggtcaaggacaacgaagtctacctgattgaagtcaacccgcgtgcggcgcgtaccgtaccgttcgtctccaaagccaccggcgttccgctggcgaaagtggcggcgcgcgtgatggccggcaaatcgctgaccgagcagggcgtgacccaagaaattatcccgccgtactactcggtgaaagaagtggtgctgccgttcaacaaattccccggcgttgacccgctgttagggccagaaatgcgctccaccggggaagtgatgggcgtgggccgtaccttcgcggaagcgttcgctaaggcgcagctgggcagtaactccaccatgaagaaacagggccgtgcgctgctctccgtccgcgaaggcgacaaagagcgcgtggtggatctcgccgccaagctgctgaaacagggctttgagctggatgccacccacggtacggcgattgtgctgggcgaagccggtatcaacccgcgtctggtgaacaaggtgcacgaaggtcgtccgcacattcaggaccgtatcaagaatggcgaatatacctatattatcaacaccaccgcaggtcgccgcgcgattgaagactccagggtgattcgccgcagcgcgctgcagtataaagtgcattatgacaccacgctgaacggcggttttgccacgacgatggcgctcaatgccgatgccaccgagaaggtaacctcggtgcaggaaatgcacgcgcagatcaaaaagtcgtaaacaaagggtccggcggatattgctctaaccggacctgtaatataatgttgaaagggtttctgtaaagaaaccctttttttatcttgcgtaaggtcattcctggagaagtccgtttccgtaaccacattttcaatgtaataagcacgatattgctcacactaatcaatatttaagtcgcatactatcttgcatatccacaattttaatatggcttagtttttattagtttggacaggccgtagccagatttttaatttgtgaaatggtgtgcttatgtgtgaaaaatatgttgaaagaccgctttatttgttaattgctgactggatgatggcagagaaccgatggatcactgccagggagatttcccgtcaatttgatattgaacattgcaaagcaattaatacgctctcctatattctgtcagaagtgggggaaattgtttgtgaagtgaagatgatccctaaccaaattgcaggacgaggctgccagtgccagcgtctggtgaaagtcgtgagtatcgactctcaactctatcgccgattgaatcataatttgcaggaaagaaaagtgagcgtggcgaaagcgccgcggctgtctgccgttccccccacagagctaaaccgtgagcagaaatggcagatgatgctctccaagagtatgcgtcgctaattgtctgtttacctgctggcggggtaaacggtaattgacgcgtaggccggataagcgtgagcgcatccggcatcaattactgtgctgattttggcttcacgtccgtcgtgcctttcaggcgcggtcggttttcttcggcctgcgttaacggcttcgtttcagataaccccgttcgacaacggatcgcaagatcctgatattctttggtattgaggtgtttccagtgcagctcctggtccgtaacctggcgtagtacgcgcgccggtgatcccaccaggagttgccttgcctcaccctgaaatccggctttgacaaaactcatggcggcgacaatgctctcttcgccaatcactgcgccgtccataatgacgctattcatgccgaccagggcgtcccgtcccaccacgcagccatgtaaaatagcgccgtggccgatatggccgttttcatgcacgatggtatcggtatcgcagtagccatgcataatgcagccatcctgcagattagagcctgcctccaggatcaggcgaccataatccccacgcaatgacgcgagtgggccaatataaacaccggcgcccacgatgacatcgccaatcagcacggcgctggggtggacaaacgcgtccggatgcaccaccgggatcagtccttcaaaggcgtaatagctcatagttgtacctcggttttttgccggatggcggcgtaaacaccttatccggtctacggttgcgcatgtgctgtaggccggataagcgaagcgccatccggcatagtcacattaacgacctttccacaccggatcgcgtttttcggcaaatgcctgcggtccttcgagcgcatcttctgaatgcagcaccgacggataatgcttcagtacgccgctgcggatgtagcggtagccttcttctaccggcatttcgctggtcgcgcgataaatctctttcagcgccgcgatagccagcggggcgctattgaccagttgttgcgccagttcgcgcgcactctccatcagttcgctctggctgacaacgcggttcacgactccccaacgcagcgcttcttcggcgctcattcgtctgccggtcattaccatttcgttgacgatagccggtggcagcagcttaggcagacgcaatacgccgccgctgtcaggcacgatgccgagcttggcttccggcagcgcgaagctggcgttttcggcgcagacaataaagtccgccgccagcgccagctcaaaaccgccgccaaacgcgtagccgttcaccgcggcgataaccggcttatcgaggtcaaatatttcggttaaaccggcaaagccgccgggaccaaaatcggcatccggcgcttcaccttccgctgccgcttttaagtcccagccagcagaaaagaatttctccccgccgccggtaatgattgctacgcgtaattccggatcgtcacggaaattaagaaaagcttcacccattgcaaagctggttttggcgtcaatggcattcgctttaggtcggtcgagggtaatttccaggatcgggccgttacgggtcagatgtaatgactcactcatagttcatctccagataaatagttttccggcgggagggattcctgccggaaggtttatttcagattttttttgattatttttcctgaacagttgcgcggcaggtcggttctgatctccataaaagagggaaccttgaacttcgccatattgttttcgcagaagctgaaaaactcggcttcgcttaatgtttcaccttcattaaggacaataaacgctttaatggcttcatcacggatcgcgtctttaataccaaccaccacaatgtcctgaattttcggatgcgcagaaataatattttccagctcgacgcaggagacattttctccgccgcgtttaatcatgttgcagcgcctgtcgacgaaataaaaatagccatcctcatcctgatagcccgaatcaccggtatgtaaccagccctcaggttccagcgctttggcggtagcctccggctgcatgtaatactctttgaagatagtcttgccggggatgcctttaatacagatttcgccaatttctccggcgggcagcgggcgattttgatcgtcgcgaatttcagcttcatagctaaaacccacgcgaccaatggaaggccagcgccgtttgtctccgggacggtcgccaataattccgacaatggtttcagtcataccataagaggtcagcagcctgacgccaaagcgttcggtaaaatcgtctttttcctgctcggataaattgagatagaacatcacttcgcgcaggtgatgctgcctgtccgttggtgcggcgggctggaccatcagcgtgcggatcatcatcgggatgcactcggtcaccgttgcctgatatttacgtacctgatcccagaaggccctggcgctgtacttctctagcagcacaaaggtgctgccggcggaaaaggctggcattgcggcggtacactgacagtcgatatgaaaagcgggcatcaccgtcatgtacacgtcatcatcgcgcagggcgatttgccaggcagagtagtagcctgcaaaacgcaggttgtagtgggtaattaccacccctttaggccgtgaggtggtgcctgaggtaaacagaatttccgccgtatcgtcagtggataacacgggcgtatagcacagcgtggccgactggcgtgcttgtagttgggtaaagtggctcacgccgtcgtcagccggaagctgctcgccaatcagacagatatgattaagcggagtgctattgtcctggcgtatttcacggtacataggataaaactgggcgctggtaaccagcagactcacctggctgttttgcaggatccaggcgctttcttcgcccagtaagcgggcattaatcggcaccataatggcgccgatttttgccagtccaaaccagcaaaagatgaattccggacagttatccagatgcagcgcgaccctatcacccttgcggatccctaaggaataaaaaaggttcgccgtgcggttaatctcttcattgagcgaagcatagctaaactgccgaacgattccctcacaggattcgaaaattaacgccgttttatctccgtacaccccggccaggtcgtcccacatctgacgtaagttttgtccgccaacgatatccatattgctttatccactgaaatcaggcgtgagcgctaaccggaaaaccgattagcgcatcgcgtttaatcctcaactttggccaggcctttgccgaccagttccttaatatctgcttcgctataaccaatgtttttcagaatggcggcggtatccatgccgtgtgacggcatgccacgccagattttccccgggttgtttttaaatttcggcatgatgttcggccctttacaggtgcgaccgtccattgtttgccactgagtaatcgattcgcgggcaacgtactgcgggttaccttccagttccggaatggtgagcaccttcgcacaggcgatattcagttcagcaaaacgcgcctgaacgtcggcgatggtgtgtgttgccagccaggcgtccagtttctcttcgacgagcgggccgtaagggcattccacgcgatggatgagttgtgtgccttccggaacttccggcgtaccgagaatgtgggccaggccaatatctttaaaacactcgttgatttgcgtgatgccgaccaactccatgacgatgtaaccatcggcgcatttatacaggccgcaaccagcgtagtaggggtctttccctttcgtcatacgtggacagatttcgccgccgttgaagtagtccatcatgaaatactgacccatgcgcagcatcacttcgtacatggcgatatcgatgctttcacctttacccgtttcgcgtactttgtgcagggctgccagcgcggctgtcgtcgcggtcatcccggagaagtaatcggcggtatacgggaaggctggcatcggctgatcaacgtcgccgttttggatcagataaccactgaatgcctgcgcgatggtgttatacgccggaagattggtgtactcctcggtaccatactgaccgaagccggaaaggtgggcaatgaccagtttcgggttatgttcccacagcacttcatcagtaataccacggcgggcaaaggccgggcctttactggcttcaatgaaaatatcggtggtttccatcagtttcagaaacgcttcccgaccttcatctttgaaaatattcagcgacagggcgtgcaggttgcggcgtgagagctgcgggtagttaggctgtacgcggatggtatcggcccatgcgacgttttcaatccagataacctctgcgccccattcggcgaacatctgtccggcgaatggaccggcgatttcgattcctgaaaaaacaacgcgtaccccagcaagcgggccaaaggttggcattggtaaatgattcatcatttttctcctggcattttttgcggtatgtaggccggataagcacagcgccatccggcatgattgcctgatggcgacgccccgcgtcttatcaggcctacaagggatcgattagcggtattgcttaagtaccgcacgacccaacgtcaggatctgcatttcatcagaaccaccagaaacacggtcaacgcgcaggtcacgccagaaacgcgtgatgcggtggttgcccgcgataccaacacctcccagtacctgcatggcggtgtctaccacttcaaacgcggcgttggcgcagaagtatttgcacattgccgcgtcgccggaggtaatggtgccgttatccgctttccacgcggcttccagcagcatatttttcatggagttcagtttgatcgccatatgcgcaaacttctcctgaatcagctggaaacggccaatagcttcaccaaactgcacgcgctgattcgcgtaacgcgcagcgtcttcaaaagcgcacattgcggtaccgtagttggtcagcgcgacgaggaagcgttcatggtcaaactcttctttcacgcggttgaagccgttaccttcccgaccgaacatgtctttctcgtccagttcaacgtcgtcaaaggtgatttcacagcagctgtccatgcgcagaccgagtttctccagtttgttgaccttgatacctgctttgctcatgtccacaaaccactcggtgtaaaccggtttatccggcgatgcaccgtctctcgccatgaccacgatgtacggggtataggcgctactggtgataaagcacttactgccattgagataaaccttaccatttttgcgcgtataagtggttttcagactaccaacatccgatcccgctcctggttcggtgatagcagagttccacatctgcttaccggtgccccggaacgccatgattttatcaatttgctcctgagtcccttcacgcaggaaagtgttaaaacctcccggcaattggtacaacacgtaagttggcgcgccaagacgtcccagttccatccagacggcggcgacggtaacaaaacccgcttccagaccgccgtgttcttccgggatcagcaggctatcaatacccatatccgccagcgcttttacaaaacgctcagggtagacgctgtcacgatcgcactcggcaaaataagcttcccagttctcactggccatcagttcgcgaataccggcgacaaacagctcctgttcgtcatttaagttgaaatccatctttcagcctcttgatcaattgggttaataagaattacttgtctttccagtgcactttggcgtctttaataaaggacagcgtcaccataatgttgacgaagaacagcggacatcctccggcgataatcgcggtctgaatcggcttcaacccacccagcgccagcagaacgataccgatgatgccgaccagcactgaccagccgatacgcactaacagaggcggctcttcaccatcgcgaacttcgcgacaggtcgacatcgccagggtgtaagagcaggcgttaatcagcgtgacggtggcaataaagcagaggatgaagaagccccacatggtggcggtgctgagcggcaaggcggcccaggtttcgataatggcgcgcgccacgccgtgttgctcaatcagttgcggaatgttgaggatgtttttatccatcagcagcagcgtgttactgcccagcactgtccacaggatccaggtagacgcggtcagacccatcaccatcccgaagcacagctcacgtacggtacgaccacgggaaatacgggccaggaagatactcatctggatggcgtaaataacccaccacgcccagtagaaaacggtccagccctgcgggaagccgcctttaccgatggcgtcggtatagaacagcatccgtggcaggtgcattaacagcatcccgacggagtcggtgaagtagttcatgatgaagctggcgccgctgacgataaacacccagccgagcatcaggaagctcaggtagctacgcacatcgctggcgattctgacccctttttgcaggccgcaggccacgcaaatcgcgttcagaatgatccagcaggtaatgatgatggcgtcgagttgcagcgtatgcggaataccgaacagccattgcatacactcggtgaccagcggggtagccagaccgaggctggtgcccatcgcgaagatcagcgccaccaggtagaagttatcgacgatggtaccgaacaaccctttcgcatgcttttcaccgacgagcggtaccagcgtggagctggggcggatgacatccatcttgcgtacaaagaagaagtaggcgaaggccacggaaaggaagctataggttgcccacggcagcggcccccagtggaacaggctgtacgccaggcctatctctttcgcgcccgtggaatttggttccaggccgaacggcggggtggagatatagtagtagatctcaatagagccccagaacagaaccgcagcggatgtacaggaggcgaacatcatgaaaatccagctggcggtgctaaactccggtttttcgtcacctaatctctttttggcataggggccaaaaaccagccagaaccagccgaagagcatgacgaccatataccattcaaatgcccaaccccagacgttggtgacataactgaataccgcattaataacgacgttagcggcatcaagatctctgactgttagccagcaaagtatcccgacaattattaatggcggaaaaaaaaccttcggttcaattcccgattttttcttttcatttttcataagtgaattccagtgtgaaaacgaaatttatttagcgtgccagtccatgaacgtttgtttatttattattaatgatttgttgataagtttttaacctctgggacgcctcaatgagtaactcatgatgggtattcacttcgggtgattctgttatcttcgtcacacttttttgcgttgattattttgtgtctaaattttgatttttgctttatttatcaattgattggttgtggttttttaacttttttaagtatctggcgttcaatattgttgagccagcaaacaatattgaaaattttcatatttggcatatttctttcaatattggtgaggtgcgtaacactattgaaagttacgaatatcaatgtgtgacattttcaatattggtgattaaggttttatttccgaattaaagagcgtgatatctgtatttaacaccgccgatataaatacgtttccttcatgatttctggagatgcaatgaagataattacttgctacaaatgcgtacctgatgagcaggatattgcgattaataatgctgacggaacactcgatttcagcaaagcggatagcaaaatcagccaatatgatctgaatgcaattgaagctgcttgccagttaaaacagcagttgggagacgctcaggttgtcgccatgagcgttggcggcaaagcgctgactaatgcaaaagggcgcaaagatgtcctctctcgtggccctgatgaactgattgtggtcattgacgatcaatttgagcaggcgctgccgcaacacaccgctaccgcgctggccgccgccgcgcaaaaatcaggtttcgatctacttatctgcggcgacggttcttccgatctttatgctcagcaggttggtttgctggtgggcgaagcgctgaacattccggcgattaacggcgtgagtaaaatcctctctcttaccgacagcacattgacagtagaacgcgaactggaagatgaagttgaaacgctgagcatcccgctcccggcggtgatcgcggtttccaccgacattaacaccccacaaatcccttcgatgaaagccattcttggcgcggcgaaaaaaccggttcaggtctggtcgcctgcggatatcgggctgaacagcgtacccgcgtattccgcacaacaggttgccgcaccgaagcagcgcgagcgtcagcgtgtggtgattgaaggtgacggtgaagaacaaatcgccgcgtttgtcgagaatctgcgcaaaatcatttaattatcaggggatgttatgaacaaattttccagtgtctgggtattcagcgataccccttctcgtctgcccgaactgatgagtggcgcgcaggctgtaggtgaaaaagttaacgcgttcgtactgaacgaagcagacagcgcgacagcatgtcatttgggcgcggatcatgtctggctgctcagcggcaaaccagaagaccgcatgatcgaagactacgctgctgcgatggctgagactattcgtcagcatagcgagggcggcgcggtgctgctgccgaatacgcgtcggggcaagctgttggcggcaaagctgggctatcgcttgtcggctgcggtttccaacgatgccagcgacgtctccctgcaggatggaaaagcggcggttaaacatatggtctacggcggtctggcgataggggcagaaaccatcgcttcgccgtttgccgtgatcacactcagcagcggaacgtttgacgcacaacaaccggatgcttctcgcagcggcgagatgcacaccgtgcagtggcaggctccggccactgccgtgacccgcaccgcaacccaggcgcgtcagagcaacagcgttgacctcgacaaagcgcgtctggtggtcagcgtgggacgcggcatcggcagcaaagagaatatctcgctggccgaagcgctgtgccagacgattggcgccgagctggcctgttcccgcccggtggcggaaaacgagaagtggatggagcacgagcgctacgtcggtatctccaacctgatgctcaaacctgaactgtatctggcggtggggatctccgggcagatccaacacatggtcggcgccaacggcgcgcagacgattttcgccatcaacaaagataaaaacgcgccaatcttccagtatgcagattttggcatcgttggcgatgcgctgaagatcctgcctgcgctgacggctgccttagcgcgataaaccatttcgggcaggatgcgaaggtatcctgccgctgacaggagtacgtatgtccgaagatatctttgatgccatcatcgtgggtgcaggtctggccggttcggttgcggcgctggtgcttgctcgcgaaggtgcacaggtgctggttatcgagcgcggcaattctgctggcgcgaagaatgtcaccggtgggcgcttgtatgcacatagcctggaacgcatcattcccggctttgcggatcaggcccccattgaacgcatgatcacccacgaaaaactcgcctttatgaccgacaacggggcgatgactatcgactactgcaatggtgaagatgcttcagcgtcgcaggtttcctattccgtcttacgcagtaaatttgacgcctggctgatggagcaggccgaagaggcgggggcgcaactgatcaccggtattcgcgtggataacgttgttcagcgtgatggcaaagtcgtgggcgtggaagccgatggcgatattctggaagccaaagtcgtgatcctcgctgacggggtgaattctctgctggctgaaaagctgggcatgaccaagcgtgttgaggcatcgcatgttgctgtcggcgtgaaggaactgatcgaattgccgaagttggtcattgaagatcgtttccagttacagggcaacgaaggtgccgcctgtctgtttgccggagcgccgaccgatggtctgatgggcggtggcttcctgtatacgaatgaaacaaccctttccctggggctggtctgcggtcttcatcatctgaaagacgcgaaaaaatcggtcccgcaaatgctggaagatttcaaacagcatccggcagttgcgccgctgatcgccggtggcaagctggtggaatatgccgcgcacgttgtacccgaggcgggaatgaatatgcagcctgaactggtgggcgatggcgtactgattgccggggatgctgccggcatgtgtatgaacctcggctttaccatccggggtatggatctcgccatatccgcaggcgaagcggcggcgaagacggtgctttcggcgatgaagcgcgacgattttagcaagcagtcgctgggtgaataccgtcagcatctggacgaaggtccgatgcgcgatatgcgcatgtatcagaaactaccggcttttcttgataatccccgcatgtttaccgcttatcccgaaatggcggtcaatatcgcgcgcgacctgttcaccgtggatggctccgctccggtgcccatgcgtaaaaaaatcctgcgccatgcgaagaaagtgggcttcattaatctgatgaaagatggcctgaaaggagtgaccgtattatgacatctcccgttaatgtggacgtcaaactgggcgtcaataagttcaatgtggatgaagacagcccgcacatcattctcaaaaccgatcctgataaacaggcgctggaggtgctgattaaggcctgtccggcgggactgtataaaaagcaggacgacggcagcgttcgttttgattacgccgggtgcctggagtgcggaacgtgccggatcctcggccttgatacggcgctggaaaaatgggaatacccgcgcgggacgtttggcgtagagttccgctacggctaataagtacgaagttgtgcccccgttggccggataagatgcggtagcgtcgccatccggcaatcatgtggcgccaatgccggatggcggcggaaacgccttatccggcctacagatgcgctttgcccgtgttgaaacaggacatcaccatgcagcagcccaggaactttgatgaccttaaattctcctccattcatcgcagaattatgctgtggggaagcggcggcccgttccttgatggctacgtgctggtgatcattggcgtggcgctggaacaactgacgccgctattgcaccttgatgctgaatggattggcgcgctcggcgcggctacgcttgccggactgtttatcggcacctcgttgtttggctatatttgcgataaagtcgggcggcgtaaaatgttcctgcttgatattatcgctatcggcgttatctccgtggcgaccatgtttgtttccacgccgcttgaattactggtgatgcgcgttttaattggcattgttatcggcgcggattaccctatcgctacttccatgattacggagttttccaacacccgccagcgcgcgttctccatcggttttatcgccgcgatgtggtacgtcggcgcgacctgcgccaacctggtgggctactggctgtatgacatggaaggcggctggcgttggatgcttggcagcgcctttatcccgtgcttaatcattttgattggccgctttgacctgccggaatcgccacgctggctattgcgaaaaggacgggtaaaagagtgcgaacaaatgatgatcaaactgttcggcgaaccggtctgctttgacgatgagctgccgcaggagacccgcttcctgcagctgtttaaccgccgtcatttcccgtttgtactgttcgttgcggctatctggacctgtcaggtgatcccgatgttcgctatctatacctttgggccgcagatcgtcgggttactcggctgggagcaggggcgcaacgcggcgcttggcaatgtggtgattagcctcttttttatgctgggctgtataccggcgatgttctggctaaacagtattggccgtcgccctctgcttattggcagcttcgccatgatgactatcgcgctggcgctgctggggctggtgtcaaatctgggcatcatactggtcgtggtggcgtttgcggtatacgccttcttttccggcggaccgggcatactgcaatggctttatcctaatgaactcttcccgacggatattcgcgcttcggccgtgggggtcatcatgtcattaagccgcatcggaaccattgtctccacctgggcattaccgatttttattactcgttacggtattaataacgtcatgctgattggcgcgttgatttcgttagtcgggcttggcgtatcggtgatgtttgccccggaaacccgcggcttgacgctaacacagaccggaaacatgactttgcgcggaacgccatcggataaccctcgttaagagtgttctgcatttctccctgcttttcgccaataacgctacagttaacagtcacatgctaaaacaactgaaaagcagggagaacaccatgcaaaaacgtcttatgaccgcactgtttaccgcagcaacactattcaccgtcgcaggatgctcttctaaccaggcggttgaaaccacggatggcaaaactattgtcaccgacgggaaacccgaggtcgataacgataccggtatggtgtcttacaaaaacgccgccaccgggaaaaccgaacagattaaccgcgatcagctgaaaaatatgagcgagctggataattaattcaatcttttctggttagccgcgcaataatattttctctttatgcgcatccatttattcccatgcgaataaacggatgcctgaacaggcagggacgccggaaaacgtcgaaatacgttagaccattcgcccgtgttcccgctttccccaccgcgctgtccgcttacatgaggttacactcatcgacatttctctgaacagcggctcaacatttcccggaaaaaaacatatcgcagggcatttatccttatgattaggtataaatgatgaggtataaggaacaggagtctgtaatgaaaccaatacctttttatttgctcgcgctattttctgccgcctccggggctacggagataaacgtctgcaaagacctgatcggaacatggaaaaccacggcagataacccgccttataccatgacaatatcgccgccagtagaaagctgcggggaaaaatgtgtgaaactgaacgtgcagtatgaacttgacgtgactcaccgcaacgcgctttattgccatgaaggacaagagggggtaaaagggcagggacccatggtgatagcatttgaaggggcgtatggtggacacgctattggaacctataaccgacagctgcaattactttgggctggcgtaatatcgaaaaataaaaaggggaaatggataacgaaaatggaaaattactggttcaggcaggtaaaagcgcactaaacatcatcttaaaacagcccgcaaaaccgtcttattcacgaagggcttactgcctgcgcgcgcacattccaacggcttgcctgccccggatgaactgttgataaaaaagagggccagcatccgtttccagacggccctgagtggattgtgacgtaacatggcaccttgctggcgctctcttattatttcatgccagtgccctcgttatggcgcaatcagagctttatttcgtcgcatcgttataaacttcggcaacggcttcaaaattcggaccatgctcacgtgcagcgataatatggtaatattttccgcctttcgcatcggctaattctgacagtttttcgcgtagatcagagggtgaggaaatctgtccgccactctgggacacatttatggtgccgaccttaaccagtttgaagtggctgatttcttgtttagagacctgctctgccgcaagtgtgctgaatgaagcaaccgttgccagtaatgcggcggcaataatgcgttttttcatagttctgttcctgttgcattgatgataaggtttgcgcaatatcagtaatccgtaacgaaattatttatccccttcatacttcaggttgcttatgggttggctacggattactcggcccacccatgggcctcgccctgacgggccgtcgcacgcgacgttcaaatctgctcccggcaaatttgtcgctcacctcagtcacataattatctatgctcccggggactcactcccttgccgcctttaagcaactcgaattattttgggtaataacctcggttgattatctgaaaatagccttatttggtgtgaccgtcttttatcttgttatagtcacctctttatgttgttgtcaatgtaaaataatgcactgccagctaaaaagaaacttaaccccctgtaaataatagtttttatattatttcttttaatggcgtaatttttattgaatcacgcggcaatacgctagttttattcataagcaacataacagaattgagttatgttttaatttcccagagtgatattaccggttgtatgtctatggttgcgcggcctgttactgatagtgtttctttcggggcgattttattgtagcggcatagggtaatcaccgtagctgaagggaaaaggcacgaacacagcactatagagtatgtttaataatgtatttttttatgaagtaatgtctgcagttgtatctctaaaataaaaacaatgaacttttcatctaaataatttttcagtgaattatggttatttattaatatatttctaatttgaaatacaaatcaatttataacacatattcttacccggaaggcattgatacatatccacgcttcctcgtacagtaataaatgaatatgtgataaagttactgactacaggtataataatatgagtaataaaaaaaatctgtccgcagaagagacggatcttacgcgtaggaaactgttaaccagtgccggtattcttgccgcaggcggtatgttatccggcgcggtaaaggctgatgaaaaatgcgccgtcaaggcgaaaccggcgtgggataaaccgtttactggcgaaatcccggaaaaattgccagaaggatataatattctgttagtcgtgaccgaccaggagcgtttttttcctacgtttcctttcccggtacccggcagagagcggctcatgaaaacgggggtgacattctgtaatcatcagaataccagtaatgtctgtacgccttcccgctccgtattgtataccggcttacatatgccccagacaaagatgtttgataatttgggattaccctggatgccttatgaccttgaccccgctcttggaaccacaggtcatatgatgcgggaactgggatactatacggcctataaaggtaagtggcatcttacagaaaaactggagaagcctttgcctgacgaaaaagatgaggatattgatgtcggggatattcctgaaccagaattacataaaattatggaaaaatatggttttgctgactatcacggcatcggcgatattataggccatagtaaaggcggctatttttatgattcaaccaccacggctcagactataaattggttaagatgcaaggggcagcccttgaatgaccaacacaagccctggttcctggccgttaacctcgttaatcctcatgacgtcatgtttattgataccgataaagagggagaaaaggtacagtggcgtggcgagttggatcaggatgataataccctggcgcccacgcagccaccggaaaacgaactttatcaggcaagctggccgaactatccgctgccggcaaacaggcatcaatcattcaatgagcagggaagaccgccggcgcatcttgaataccagacggcgcgcgctgcgctggaagggcagtttcctgatgaagatcgtcgttggcgtaaactgcttgactactatttcaactgtatccgcgattgtgatactcaccttgaccggatattaaatgaacttgatgccctcaagttaactgataaaacgattgttgtatttactgccgatcatggcgaattaggcggaagccatcagatgcacggtaaaggcgcttccgtttataaagaacagatccatgtaccgatgattatttcccacccggcgtaccccggtaataagaaatgtcaggcgttgacctgtcatcttgatatcgcgccgacattagttggactgaccggtttgccggaagaaaaacagcaccaggcgttaggcaaccgcaaaggcgttaattttagcggattgctaaaaaacccggagagcgttgcggttaatgcggtgagaaatgccagcttatattgctatggcatgatcttgtataccgatgcccattatctccaccgcgttattgcgctacaaagagataaacaaaaaacggtggcgcaaatcaagcaggaaatatctcatttgcatcctgatttcagccatcgttcagggacgcgcatgattaacgatggtcgttataagtttgcacgctatttctcgctaagggagcataatacgccggaaacctgggaggatcttattaagtacaacgatcttgaactttacgatcttaaaaatgatcccgatgagaaccataaccttgctgctgataaacagaaatatcaggatctcattcttacgatgaatgaaaaactgaataaaattatcaaagacgaaattggcgtggatgacggcagttttatgccggatgcggcccatgagccgtgggatcttactattgagcaatttaaccgcatggcgaaagattaagagcctggcccattaggctattttattcgtcggcgatctggcatccagcgtgtctggaggttcagatgctgttggcgctgcgcttattgggtctgtatcatcatgtaatggattgatattacagtcattacaggcaaatttagcgcagcgccgcccgacaagaaggccttaaaccgattggtcagcgatttaaggctactatcatcaccgacctttccacaccggatcgcgcttttccgcaaacgcctgcggcccttcgagagcgtcttccggaggcaggacggcgccagctcctggctggcgttaattcaattttttctgattagccgctcaataatattcactattagcctggcgaatttgtcactacactttgtaataaaaaacagatcatcacaggctaatcatgatcctcattatttatgcgcatccgtatccgcatcattctcatgcgaataagcggatgcttgaacaggcagggacgctggaaaacgtcgaaatacgttcgctttatcacctctatcccgatttcaatattgacgttgccgccgagcaggaggcgctgtcgcgcgcgagtcttatcgtctggcagcatccgatgcagtggtacagcgtccctcctttactcaaattatggatggataaagtcctcacccacggctgggcttacggtcatggcggtacggcattgcatggtaaacatctgctgtgggcggtaacgaccggcggtggtgaaaaccactttgctatcggctcccatcccggatttgacgtcctttctcagccgctacaggcgacggcgctctattgcggcctcaaatggctgtcgccgtttgccatgcactgcacgttcatttgcgatgacgacaccttacaggcgcaggcgcgtcagtataaacagcgtttactggcatggcaggaggtgaatcatggatagccatactctactgcaggcgctgatctatcttggttcggcggcgttgattgtgccgattgcggtacgtttgggcttaggatcggtgctggggtatctgattgcgggttgcattatcggtccctgggggctacggctggtgacggacgccgaatctattctgcattttgcggaaatcggcgtcgtgctgatgttgtttgttattggacttgagctggacccgcaacggttatggaagctgcgcgcctcggtatttggcggcggcgcgttacagatgggggtctgcggcggactgattggtctgttctgtatgtttcttggcctgcgttggcaggtggcggaactgattggcatgacgctggcgctttcgtccacggctatcgccatgcaggcaatgaatgagcgtaacctgaccgtttcgcaagtagggcgtagcgcatttgcagtgctcttgttccaggatatcgcggcgatcccgctggtggcgatgattccgctgctggccgccagcggcgcatccaccacgcttggcgcgtttgcgctatcggcgttgaaagtcgcaggcgcgttggcgctggtggtgttgctgggacgctacgttacgcgcccggcgctgcgctttgtcgcgcgttctggtttgcgggaagtgttcagcgccgtggcgctatttctggtgtttggtttcggcctgttgctggaagaggttgggctgtcaatggcgatgggcgcgttcctggcgggcgttctgctggcgagttcggaataccgtcatgcgctggaaagcgatattgaaccctttaaggggttgctgctggggctgttctttattggcgtcggcatgtcgattgatttcggcacgctggtggagaatccgctgcgcattctgctgttgttggccggttttctggcaatcaaaatcgtcatgctgtggctggtcgcgaggccgctgggcgtaccggcaaaacagcgtcgctggtttgccgtcttattaggccagggaagtgagtttgcgtttgtggtttttggcgcggcgcaaatggcggatgtacttgagccggaatgggcaaaagcgctgacgctggcggtcgcgctgtcgatggcggctacgccgatttttctggtgctgctgacgcgcatggagaagaccgcgacgggtgaagcgcgcgaggcggatgaaatcgacgaagagcaaccgcgggttattgtggccgggtttggacgatttggtcagatagccgggcgtttgctgctgtcgagcggggtgaagatggtggtgctcgatcacgaccccgatcatatcgaaacgctgcgtaaattcggcatgaaggttttttatggcgacgcgacgcgtatggatttactggaatctgccggagcggcgaaggcggaggtattgattaacgccattgacgatccgcaaaccaatttgcaactgagtgaactggtgaagtcgcatttcccgcatctgcagattatcgcccgcgcccgtgatgtcgatcattacattcgcctgcgccaggctggtgtggcgatgcccgaacgtgaaaccttcgaaggcgcgctcaaaagcgggcgacaggcgctggaggcgctggggctggggcgttatgaagcccgcgagcgcgcggatctgttccgtcattttaatacccggatggtggaagagatggcgaaaggggaaaacgatccgttatctcgcgccgccgcctataaacgtaccagcgcgatgttgagcgaaattattaccgaggaccgggagcatctgtcgttgattcagcgccacggctggcagggaacggctgagggcaaacattccggggaggtcgccgatgaacccgaggtcaaaccgtcaatctaaagtaaaaaatgtgatgttctgcaaactttactgctaattggctgtttttgaactactgtaatgctggcgctccacatcaaatgagtggcgtcgccagcagaacgaaaaattttcgtgctcatcctcttttcgtcagtcgacgaaagattgcgctttacgtatagtggcggcaattttttttgtatcaggaaataattaatgatcagtctgattgcggcgttagcggtggatcgcgtcatcggtatggaaaacgccatgccgtggaacctgcctgccgatctcgcctggtttaaacgtaacacgttaaataaacctgtcgtcatgggacgtcacacctgggagtccatcggacgccccttaccgggacgtaaaaatattgttatcagcagccagccaggcaccgacgatcgcgtgcagtgggtgaagtctgtcgatgaggcgattgccgcttgcggcgatgcgccggaaattatggtcattggcggcgggcgcgtgtacgagcagttcctgccaaaggcgcagaagctttatctgacgcatattgatgcggaagtcgaaggcgatacccattttccggattatgaaccggatgactgggaatcggtattcagtgagtttcacgatgccgacgcgcagaattctcacagctattgtttcgagattctggagcgtcgttaacgctgtagtgccggatggcggcgaaacgccttatccggcctactcttgagccagatgtcgccagatgtaggcctgataagcgtagcgccatcaggcataaacctatcaggcgttgaccgcttcgccttcgcccatatccatctggcggtttgacggctgcacaaaatactgtttatcttcccagcgtaaacaggtcaactccccgccccagcagcagccggtatccagcgcgtaaataccttccggcgtccctttcccttccagcgacgcccagtgcccgaacgcaatactgtaagcctcgctcaccggccccggaatggcgaaccacggcttcagcggcgcaggggcattttccggcgacgctttgctgtacatatccagttgaccgttaggaaagcagtaacgcatacgggtaaaggcattagtaataaagcgtagccgcgccagaccgcttaactccggcgaccagttattcggcatatcgccatacatcgcgtcgaggaaaaacgggtacgagtcactcgacagcaccgcttcaacatcgcgggcgcactcttttgccgtctgcaaatcccactgcggggtaatacccgcatgcgccatgaccagctttttctcttcatctacctgcaacagcggctgacggcgtaaccaattcaacagctcatcggcgtccggcgcttcaagaagcggggtcagccggtctttaggtttgttgcggctaatcccggcgaatacggccaacaggtgtaaatcgtgattccccagcaccaaacgcacgctattgccaagcgatttgacgtagcgtaacacgtccagcgaaccgggaccgcgggcgaccaaatcgccagtcagccacagagtgtctgtgtctggcgtaaattccacttgctgtaataaggcgatcagttcgtcgtagcaaccgtgaacgtcgccgatgagataagttgccattgttataattttagtgaatgagtgtagggacggcgagtcgaaacacggggatgtcgatggtaaaggcgtcgccattttcatcgatcatttcgtaatgaccctgcatggtgcccagcggcgtttcaattaccgcgccgctggtgtactggtactcttcgccaggcgcaatgcgcggctggacgccaaccacaccttcgccctggacttcggtttcacggccatgaccattggtaatcagccagtagcggcccaatagctgcactggcgcccggcccagattgcggatggttacggtataggcaaaaacgtaacgttcatcgtcaggtgaggattgcgcctcaatgtagacgctttgcacctgaatacacactctgggcgaattgatcatgtttaactctccttcaaaggcgcgttttccgacagatagttggccatctggcagtactgcgcgacagagatattttccgcgcgcattgccgggtcaatacccatttccgtcaacgtctcaacgctaaaaagattgccgagactgttacggatcgttttacggcgctggttaaaggcctcggtggtaatacggctcaacacgcgaatatctttaaccgggtaaggcattgttgcgtgtggaaccagacgcaccacggcggagtccactttgggcggcggcgtgaaggcggatggcggcacttcaagcaccgggatcacctgacagtaatattgcgccatcacgcttaaacgaccatactctttgctgttcggccctgcaaccagacgatttaccacttctttttgcaacataaagtgcatgtcggcaatggcatcagtatagctaaagagatggaacatcagcggggtggagatattatagggcagattgccgaacacacgcagcggttggcccaactgcgcagacagttcgccaaagttcatggtcatggcgtcctgctgataaatagtcagcttcggccctaaaaacggatgggtttgcaaacgcgccgccagatcgcggtcaagttcaatgaccgtgagcttatccagtcgttcgccgaccggctccgtcagcgccgccagaccggggccgatttcaaccatcgcctggcctttttgcggattaatagcagaaacaatactgtcgatcacaaaccgatcgttgagaaagttttgcccgaagcgtttacgggctaaatggccctgatggactcgattattcattgggtattaacaatcattttgatggcgagattaagcgccgtaataaaactgccgacatccgcttttccacggcccgccagttcaagcgcggtgccgtggtcaacggaggttcgaataaaaggtaggccgagcgtaatattcactccccgaccgaatccctggtattttagcacgggcaggccctgatcgtggtacattgccagcaccgcgtcggcattatcgagatatttgggctgaaacagcgtatcagcaggtagcggcccgttgagtttcatcccctgcgcccgcagctcgtcgagcaccggaatgatggtgtctatctcttccgtgcccatatgaccgccttcgcccgcgtgcggattcaggccacagacaagaatgcgcggttcggcaataccaaatttggtccgcaaatcgtgatgcaaaatagcaatcacttcgtgcaaaagcgcaggggtgatggcgtctgcaatcgcccgtagcggcagatgcgtggtcgccagcgccacgcgaagttcttcggttgccagcatcatcacgacttttttcgcctgcgaacgctcttcgaaaaactcggtatgaccggtaaacgaaatgcctgcgtcgttaataacgcctttgtgcacggggcctgtgatcagcgcggcaaattcaccgttcagacagccatcacacgctcgcgccagcgtctctaccacgtaggggccattttctaccgtcaactgaccggagatggcaggcgcgcgcagcgagaccggcaatagggtcagcgttcccgcgggctgcggcgcagcggggacatcaggcgagtaagggagaagcgagagaggcaggccgagcatggcggcccgctccgtcaggagcgcgccgtccgcacagacgaccagttcaatcggccacgcgcgttgcgccagttggacgacaagatcggggccactcccggcgggttcgccgggagtgataacaacgcgttgcgcactgctcattagttactcaaaatcttaacgtaagcgctggcgcgctgttcttgcatccaggtcgccgcttcttctgagaatttacggttcatcagcatacgataagcgcgatctttctgcgccgcatcggttttgtctaccttacgcgtatccagcaattcgatcagatgccagccgaaagaggagtgtaccggcgcgcttatttggcctttatgcagcttcgttagcgcgtcgcggaacgccgggtcgaaaatatctggcgtagcccaacccaaatcaccgccctggttagcggagcccgggtcctgagagtactctttcgccgcagcggcaaaggtggttttaccactcttaatgtcagccgcgatttcttccagcttcaggcgcgcctgctgatcgttcatgatcggcgacggcttaagcagaatgtgacgagcgtgaacttcggtcacggagatactctggctctgaccgcgcaggtcatttactttcagaatgtggaagccgacgccggagcgaatcgggccgacaatgtcgcctttcttcgcggtgctcagcgcctgggcgaaaatccccggcagctcctggatacggccccagcccatctgaccgccttttagcgcctgctggtcggcagagtaggtaatcgccagtttgccgaaatctgcgccgttacgcgcttcttcaacaatgctttccgcctggcgctgcgcgtcgttaacctgctcggaggttgggttttccggcagagcaatcaggatatggctcaggttcagctcggtgctggcatcgttttgggtgccaatctgttttgccagcgcgtcaacttcttgcggcaaaacggtgatacggcgacgaacctcattgttgcgcacttcagagataatcatctctttacgaatctggttacggtaggttgaatagttcagcccatcgtaagccagacggctgcgcatctgatccatcgtcatattgttttgtttggcgatgttggcgatggcctgatccaactgctcatccgtgatcttcacccccatcttctgacccatctgcaggataatttgatccataatcaaacgttccaggatctggtgacgcagcgtggcgtcgtccggaagctgctgacctgcctgacccgcgttgagtttgactgattgcattaagccatcaacgtcgctttccagcacgacgccattattgacgacggctgcgactttatcgactacctggggggcagcgaaactggtattcgcgatcatggcgataccgagaagcagcgttttccagttcttcatactttttccatttcaattaaccgcaatgcggattacgttgtaaatcaatcagattacatagagctttggtacggcagaatgttcgaacgcaacatttcttgcgtgccgaggccgtagttagagctcaaaccgcgcagctcaatgttgaagccaatcgcgttatcataaatcgcgtgttgtttatcgttatcccaaccgttcagcttacgttcgtatccgacgcggatcgcatagcagcaagagttgtactgcaagccgagcatctggtctgcaggtttgctcgaattggtatcgaagtagtacgcgccgacaatcgaccagcgatcggcaatcggccaacttgccaccgcgcccacctgattgatgccgtttttatactgctctgccgtggaataatacgaaggcaacgtagcctgaatatattccgggctggcatagcggtagttcaactgtaccagacgatcctgatcccgacggtattcgaggctgctgctgctggtagcgacgctatccagacgggtatcgtactgcactccgctacgcagcccccagcgttctgaaatacgccagtaagtgtcgcctgcccaaaccagcgaaccggttttgtcgtcattctcccatttaatgttgtcatcgccggtgcgagactccgtgaaatagtagatttgaccaacagaaacgttaaaacgttcaacggcggcatcatcataaatgcgtgttgtgacgccggttgtgacctggttggcggaagcaatacggtcgagaccgccataagtgcggtcgcggaacaggccgttatagtcggattgcagcaaagaagaatcgtagttatagatgccgctctggtcgcggtacggcacatacaggtactgcacgcgtggttccagcgtctgggtataccccggcgccagcatcgccatatcgcgttcgaagatgagcttaccgtcgactttaaactgcggcatgacgcggttaaccgaatcttccagcttatttttattgtttggatcgctgttatagctgtccagattcgtttgctgatagtgcgtcgccatcagcttcgcttcggtgttcaggctgccccagcggttggagagcggcaaattgatggttggctccaggtggacgcgggtcgcttccggcatattgtctttggtgttaacaaagtgcaccgcctggccgtaaatccgggtatcaaacgggccgagatcgttatggtagtagttaacgtctaactgcggctccgctgaatagctgctggtgttttgatcgttaaagacctggaattgtttggtcgacaccgtagcgtcaaagttttgtacggcgtagccgacgctgaatttctgcgttgcgtagccgtcggtactggaaccgtacttactgtcgaaatcgttaaagtagctggagtcgctgactttggtgtaatcgacgttaaaacgccacacctgatccatcacgcctgagtgctgccagtagaataaccagcggtgcttatcgccctctttggggtgatcgtcctcgtagactttatcagaaggcagataatctaattccatcactccctcgcctgcctgcgtgagataacggaattcgttctcccacataatattgccgcggcggtgcatatagtgcggggtgatggtggcgtccatattgggcgcgatgttccagtaatacggtaagtagaactcgaaatagttcttggtcgtgtatttcgcgttcgggatcaggaaacctgagcgacgcttgtcaccgacgggtagctgtaaataggggctataaaagatcggaaccggacctactttaaaccgggcgttccagatctccgcaacctgttcttcgcggtcatggatgacttcactccccaccacgctccaggtatcggagccaggcagacaggaggtaaagctgccgttttccagaatggtatagcggttttcgccgcgctgcttcatgagatcggctttaccgcgcccctgacggcccaccatctggtaatcgccttcccagacgttcgtgtctttggtgttcaggttcgcccagcccttcggccctttaaggatgacctgattgtcatcataatgcacattacccagcgcatcgacggtgcgtacaggttccggctgaccttccgcctgcttctgatgaagctgcacttcatccgcttgcaggcggctattcccctgcataatgtccacgttgccggtaaaaacggcatcgtccgggtagttacctttagcgttatcggcattgatagtaaccggcagatcgttggtatcgccttttaccagaggacgatcgtagctcggcacgcccaacatacactgtgaggcgagatcggctgccagcccctgatgactataaagggcgctggcgatcatggtggccagaagagtgggaatacgttttttcatacgttgtatttattgttccatcatcggtagcgttgcgcgtgacaaacggtcacagcctaacttactcatcttcgctgcgccagtgttaatcctgccgtttagcgtctgtggtgttaggcacggcattgaatgacaggtatgataatgcaaattataggcgatgtcccacaattgaccgtagccttcatttgcagaaaagcaccttattttgtgggagatagcctcaccgatagcgtaacgttttggggagtctatgcagtactggggaaagataattggcgtcgccgtagccctgatgatgggcggcggcttttggggcgtggtcctgggtctgctggtgggccatatgttcgacaaagcccgcagccgaaaaatggcgtggtttgccaaccagcgggaacggcaggcgctgttttttgccaccacctttgaggtgatgggccacttaaccaaatcaaaaggacgggtgacggaagcggatattcatatcgccagtcagttgatggatcgtatgaatttacacggcgattcacgtactgccgcgcagaacgcctttcgggtcggaaaagcggataattacccattacgtgaaaagatgcggcagtttcgtagcgtctgcttcgggcgttttgatctgatccggatgtttctggaaattcagatccaggcggcgtttgccgatggctcgctacaccctaatgagcgggaagtgctgtatgtgattgcggaagagttaggtatttcccgcgtacagttcgatcagtttctgcgcatgatgcagggcggcgcgcagtttggcggcggttatcatcaacagtccggcggcggctggcagcaggcgcagcgcggcccgacgctggaagatgcctgtaatgtgctgggggttaaaaccaccgacgatgcaaccaccattaaacgcgcttatcgcaaactgatgagcgagcatcatcctgataagctggtggccaaagggttgccgccggaaatgatggagatggcgaagcaaaaagcgcaggaaattcagaaagcgtatgagctaatcaaagaacagaaaggcttcaagtgattgaattgccggatgcggctagcgccttatccggcctacgttaatgaatgtaggccgggcaagcgaagcgccccggcataaattggctcagaatttaaaaatctgccgggactttaaacgtcatgctgttaccgtaagcgggatgggtaatggtcagcatttcggcgtgtaactgcaaacgcggcgccagcgacaacgcttccggcgaggcgtaaaaccgatcgcctaaaatcgggtggcctaacgccagcatatgcacacgaagctgatgcgaacgtccggtgatcggcttgagcaccacgcgggcggtattatccgccgcaaactccaccacgttatattccgtttgcgccggtttgccggtttcataacacactttctgctttggccggttcggccagtcgcagatgagcggtaagtcaaccagcccttccgccggggagggatgaccccatacgcgcgctacatactgctttttcggctcacgttcgcggaactggcgttttagctcccgctccgcggctttggtcagcgccactacaatcacgccgctggtggccatatccagacgatgcaccgattctgcctgcgggtagtcgcgctggatacgcgtcataatgctgtctttgtgcgcttccagacgccccggcacggacaacaggccgctgggcttattgaccaccataatgtgctcatcctgatacaggataaccagccagggttcctgcggcggattgtagttttccatccccatgtacggctccgttattggtgcgtgacgacgataagacgcagcgcgtccagacgccagcctgcctgattcaggctttccagcacctgctgacggttgctgtcgatagcggcaagttcgtcgtcgcgaatgttcgggttgacggcgcgcagcgcttccagacgcgacagttccccggacagtttttcatccgcctcgcggcgcgcgttatcaatcagcgctctggcggacttttcaatctgcgtctcgcccagttgcaaaatggcgtggacgtcctgttgaacggcgttcaccagtttgctaccggtgtggcgattcacggcgctgagctggcggttgaaggtttcaaactcgacctgggcggccagattgttgccgtttttatctaacagcatacgtaccggcgtcggcggcaggaagcggttcagttgtagctgtttcggcgcctgcgcttccacgacgtaaaccagttcgaccagcagcgtgccgacgggcagcgctttatttttcaacagcgaaatggtgctgctgccggtgtcgccggagaggatcagatccagtccgttacggatgagcggatgttcccaggtaataaactgcgcatcttcgcgagacagggctacgtcacgttcaaacgtgatagtacagccgtcttccggcaggccggggaaatccggcaccaacatgtggtcggacggcgtcagcacgatcaggttgtcgccgcgatcgtcctggttaatgccgacgatatcgaacaggttcatggcgaacgcaatcaggttggtgtcgtcgtcctgttcttcaatgctttgtgcaagctgttgggctttttcaccaccgttggagtggatctccagcaggcggtcgcggccctgttctaactgggcttttagcgcttcatgttgctcgcggcaggatttgatcagatcgtcaaacccgtcggtttcttcaggcgcggccagatagttaatcagactggcgtaggctgaatcataaatcgcgcggccggttggacaggtgtgctcaaaggcgtccagcccttcgtgataccagcgaaccagcaccgactgggcggttttttccaggtacgggacgtggatctggatatcatgcgcctggccgatgcgatccagacgaccaatacgctgttccagcagatccgggttaaacggcaagtcgaacatcaccagattgctggcaaactggaagttacgtccttcggagccgatttcggaacataacagcacctgcgcgccggtatcttcttcggcgaaccaggcggcggcgcggtcgcgttcgataatcgacatgccctcatggaacacggcggcgcggatgccttcgcgttcgcgcagcacctgctccagctgtaacgcggtggtcgctttggcgcagatcaccagcactttttgcgaacgatggctggtcagatagcccattagccactcaacgcgtgggtcgaagttccaccaggtgccggtatcgccttcgaactcctgataaatttgttccggatagagcatatcgcgggcgcgatcttccgggcttttacgcgcgcccataatgccggagaccttaatggcggtctgatactgggtcggcagcggcagttttaccgtatgcagttcacgtttcgggaaccccttgacgccgttacgggtgttgcggaacagaacgcggctggtgccgtggcgatccatcagcatcgacaccagctcatcacgggcggcctgcgcatcgtcgcgatcgctattagcggcctgcaacagcggttcaatatcctgttcgccgatcagatcgcccagcctgttcagttcgtcgttgctgagtttattgcccgccagcagcatggccaccgcatcggcgacaggtcggtagtttttctgttcttcgacaaactgttcgaaatcgtggaaacggttcggatccagcaggcgcagacgggcgaaatggctttccatccccagctgttctggcgtggcggtcagcagcagcacgcccggtacgcgttcagctaactgttcgatggccatatattcacggctcggcgcatcggtactccacaccagatgatgcgcttcgtcgaccaccagcagatcccactcggcgtcgcacaaatgttccagacgctgcttattacggcgggcgaaatccagcgagcagatcaccagttgttcggtttcaaacgggttatacgcgtcgtgctgcgcttcggtatagcgttcgtcatcgaacagcgcgaagcgcaggttgaaacggcgcagcatttctaccagccactggtgttgcagggtttccggaacgatgatcaatacgcgttccgccgcgccggataataactgttgatgcagaatcatcccggcttcaatggttttacctaagcccacttcatccgccagcagtacgcgcggcgcgtggcgacgacctacatcatgagcgatattaagctgatgcgggatcagattggtccgctgaccgcgcagaccgctgtatggcatccggtactgctcgctctgaaatttacgggcgcgatagcgcagcgcgaaccgatccattcgatcgatttgaccggcgaacagacgatcctggggcttactgaaaaccaacttgctgtcgagcagaacttcgcgcaacgtcacattggtctcttcggtatccaggcgggtgccgacataaacaagcaggccattttcttcttttacttcatcgatatgtagctgccagccttcatggcttgtaatcgtatcgccagggttgaacatgacgcgggtcacgggagaatcactgcgcgcatacaggcggttttcccccgtggacgggaaaagtaaggtgacggttcgcgcatccatcgcaacaacggttccaagtcccagctcgctttctgtatcgctgatccagcgttgaccaagtgtaaaaggcatatgtgttcggctctatatctttaattgcaggcattactcgccattcccaggcgacagcactggataattgcgagtatacgaccccgctaccaggctaatgtggtagtggcgttaattaggtccaggaatggaaagggcgctatggtactggaaggcggcgctttcgtcacgcgtcaaaataaccccagttgcccggtcagtagtgtagcaaaattatcttcaacgaagggaagaattccttccgccacgggttgtagctggcgggtaagatagtgttcgtaatccagcggcgactgctggtaatccacgggctcggggccgttaacagtccagacatattttatggcgccgcgattctgatactgcgccggacgaccctgcttcaggttttgttcatccgccagccgggcggcgcgaacgtgcggcggaacgttacgttggtactcatgtaaagggcgacgcagacgcttacgataaaccagctgtgcgtccagttcgcccgccatcagtttatcgatagtctcgcgcacatagtcttgataaggttcattgcgaaaaacacgcagatacagctcctgttgaaagcgctgcgccagcggcgtccagtcggtccgcaccgtttccagacctttaaataccatgcgctggctgtcgccttcctgaatcaggcccgcgtagcgttttttactgccagtatccgcgccgcggatggtcggcatcagaaaacggcaaaagtgggtttcaaactccagctccagcgcgctggtcaaattttgctgttgtaacgtctgcgcccaccattcgttcacgtgacgcaccagcctgtgcccgatttccgccgcatcggcttctgaatgcgcgcgccggagccagacgaaagtggaatcggtatcgccataaatcacgtcataaccctgcgcctcaatcagcgctttggtctggcgcataatcgcatgaccgcgcatggtgattgacgacgccagacggggatcgaaaaagcgacaggccgtggtgccgagtacgccataaaaggcgttcataatgattttaagcgcctgcgagagcggtttattaccctgacgtttggcttcatcgcgcccgtgccagatttggctaacaatttccggcaggcagtgcttttctcgtgaaaaccaggcgtcaaggaaaccttcggtactgtgttccggatccggctgcgccatgccttcgaccagcccgacgggatcaatcaaaaacgtgcggataatcgacgggtacaggcttttataatccagcaccagtactgaatcgtataatccgggttgtgaatccattacgtagccgccgggacttgccagcggcggcacttcgccgagattgggcgcgacatagccggcgcggtgcattcgcggaaagtaaagatgcccgaatgcggcgaccgaaccgccgtggcgatcgaccggcaggccgttgatcgtcgcgcgttccagcaaaaacggcatgatctcggttttatggaaaatgcgcgtgaccagctcgcagtctttcaggttgtaggtggcgagggcgggtttatcctgggcaaagcggcgatcgatctcatccatacgatcccaggggttatcaatggattttccttcgccgagcagttcctgcgagacggcttccagcgaaaaagacgaaaaattccagaacgcggatttaagcgcgtcgataccatcgataatgactcgccctctggcctgggcgaaaaaaacgccgtttttgaagccatgttcgcgccactccagttcgctattgtctcgccccagccgtaaagggatacggtagcgttcggcatgtttttgcagcatacgcaggtcgaactgcactacgttccagccgatgatgacatcaggatcatgttcggcaaaccaggcgttgagtttttccagcagctgcgggcggctggcgacatacacaagctcgaagtccagttggtggtcatcgccattcgccgggcccagcatataaacggtacgctggccgcagccttccagaccaatgcaatacagttcgccgtgtcgcgtggtttcgatatccagcgagacccattttagcggcggtcgatagtcggagtggggtttaagacgcgcattgcggataacgccgttgcgcatctcgccgtctacccaaacgggcgacgtaataaaacgctccatcaggtaacgttccggcgggcgtacatccgcttcataaacggtgacgccgttttcgcgcagcagtttctccatccgcataagctggcggtgagtgcggcaatacagaccggataccggctgacgatgaaagtctcgcagctggagcggcgtcaggcgatagtctttttccgcctgtagcagcgaggcggcgcgggaggtctggctggtcggaataaacgccacggactcttgcggcgccagcgttgcctgcacagggccgttgtctgtcgccagccagaaagagacctccgtcccttgcggcgtatcccgccagtgccgggttaaaatgaaacctgcctgcgccacgatgattacctgtctaaaaaattcacgctaattataacctgttttagggggtaatactgttattttgtacaggcatataacgtaaaagccgatatccgctgtaataaaaagtttctcgcagtaagaagcgggtttgcgcccaccaggatttatagcgggtggatcgcgtgggtgatgagcggctatcgataccattatcctgagcgatagttttcagacgcagcatatgcagcggatcgctgaccagtaacgctgtgcgccattgttgttgtcgcagtatctgttttgcgtaacgaatattttcgcgcgtcacggtagagcgctcttcaataaaaattgccttagccggaatccctttttccagaacgtattgacgggctatcgccgcgtcggaaaccgttgcgccagcgccgtagccgccggttaataccaacgcgcggacaatgtgttgttggtaaagccagatggcatgatccagtctggcctgaaaaacgggagaaggcgtttttccgctaacgcctgctcctgcgacaatcgcgcagtcagctacgcgcgtctggttttgctgactgaactgataaatagcgatggcattatggataaacaccgtagccataatgagaattatgcctgccgcgattctgatgatgtagcgatatttcatgaatgagttcgttccccgtgacgggtgtaatggatattttaacgataaaatggcttttagcgtcagatatttttgctgacgtatatttatcaatatatacccaaaataattcgagttgcttaaaggcggcaagggagtgagtccccaggagcatagataactatgtgactggggtgagcgacaaatctgccgggagcagatttgaacgtcgcgtgcgacggcccgtcagggcaaggcccatggatgggccgagtaatccgtagccaacacataagcaactcgaagtatgaagggtataatgatgctggtgtagacagcagatataattatcctataactgctaattttgaatcatttttatttacagtttttacccatgtattagccgttttgtgtcaagtctgttttcatacattaagtatttttcagaaaggcgcttgttcgaatctgttacttatttctcggattaacaaaaaagcgatattttttgtttgttttaattaatgaaaagtgtaacaatttcatttggaacatccgcaccgtcaggtagaaatataatattccaattggccgctatggttaaataaaaatggattacagtgcgaattcgtcgggaactctctgcataatttaatttttattttagaatataattttattttgactttcgggtgcgggtgtttttatcaaaatttgtggtattcgggaatgatcttttatgaatgtgagtatgcaggcgcgtctggtagggaacgaccgttatcttttcgtcaatactcaacgcgctaacccttccataaaaaccgtgagtcgattttttgagtataaaacatggacagaacagatttggcgtaccgagattattgaaaacggcaatgctttttttcactggcaaggacacgacagaaaaaacggacatcgggataccattattaactatctgttaaatgggcaacgctggcagtcaacaatcgaagattatattttcttccatgcgctggaaggaaaagcgtggcagggacattatgacaatattattgaatatgtgagttctgatcattacgtctatcaaagcgcatttgctgaatatatcaccgaccagattcatcaacgcgccccccatgggacgcgtttttagaggcattactgcccgtaataggcttttgcgccgtgtttgcgtagatagtgtttatccagcagggattgctgcatgtcgggcaactgcggcgcaagctggcggcagaagatccccatataggccacttcttccagcacgatggcgttatgcactgcatcctcggcatttttaccccaggcaaacgggccgtgcgaatggacaagcacgccgggcatttgagcggcgtcaatgccttgtttttcaaaggtttcaacaatgacattgcccgtttcccattcatactcgccattaatttccgcctcggtcattttgcgagtgcagggaatcgtaccgtagaaatagtcggcatgggtggttcccgtcgccggaattggctgacccgcctgcgcccagatagtcgcgtggcgcgaatgggtgtgtacgatgccgccgatagtcggaaatgcctggtacaacagacggtgggttggcgtatcggacgacggtttcttatgaccttcaacgacttcaccgctctccaggctgaccaccaccatatcgtcagcggtcatgacgctataatcgacgccggacggcttaatcaccagtacgccgcgttcgcgatcgacggcgctaacgttaccccaggtaagggtgaccaggttgtgttttggcagcgccagattagcttccagtacctggcgtttgagatcttctaacattgttttctccctgccggatggcgcttcgcttatccggcctacgagcgacggtgtgccggatggcgacataaatgccttattcggcctacaggaccgtaggcccggtaaacgcagtgccaccgggcaatccgtttcaccaattaacgtttgaacccgtaatacacctcgttccagcgcagcgcgtccttaaaggccggcagatgggtatcgttatcaatcaccgcgatttcgatatcgtgtatttctgcaaactggcgcatatcgttcagatccagcgcgtggctgaagacggtatggtgcgcgccgccagccagaatccacgcttcggaggcggtcggcagatccggctgcgccttccacagcgcgttagccaccggcagtttcggcagggagtgcggcgtttttacggtgtcaatgcagttgaccagcaggcgataacgatcgccgaggtcgatcaggctggcgacgatcgccgggccggtttgggtattgaaaatcaaacgcgccggatcttccttgccgccaatgccgaggtgctggacgtcgaggatcggtttctcttccaccgcgatggacggacacacttccagcatgtgcgagccgagcaccagatcgttgcctttctcgaagtggtaggtgtaatcctccataaatgaggtgccgccctgcagaccggttgacatcactttcataatgcgaagcagagcggcggttttccagtcgccttcgcccgcaaagccgtagccttgctgcatcagacgctgtacggccagacccggaagctgtttcagaccgtgtaaatcttcaaaggtagtagtgaatgcgtggaagccgccctgttccaggaaacgcttcataccgagttcaatacgcgccgcctcccgcacgttctggcgtttatcgccgtggatttgggtggcgggcgtcagggtatagctgctttcatactcgtcaatcagagcgttgatatcgccgtcgccgatagaattcaccacctgcaccagatcgccgaccgcccaggtattgaccgaaaagccaaatttgatttgcgcggccactttatcaccgtcagtcactgcgacttcacgcatattgtcgccgaagcggcagacttttagctggcgggtatcctgtttagagaccgcctggcgcatccaggcaccgatacgcgtatgggcctctttatcctgccagtgaccggtgacgaccgcgtgctgctggcgcatccgcgcgccgataaaaccgaactcacgaccgccgtgcgcagtctggttcaggttcataaagtccatatcaatgctgtcccacggcagggcggcgttaaattgggtatggaattgcagtagtggtttgttaaggatactcagcccgttgatccacattttggccggggagaaggtgtgcagccagaccaccagccctgcgcagcgatcgtcataattggcgtcacgacaaatggcggtaatctcatccggcgaggtgcccagcggttttaataccagtttacatggcagtttggcttcggtattcagcgcgttgaccacatgctcggcatgttgggtgacctgacgcagggtttctgcgccatacaaatgctggctgccaatcacaaaccatacttcataattatcaaaaatcgtcattgtcgtgtccttaatgagtcaggattgcctgattggccggggtcgttggcgccggcgcggcagtcggaagataatgttgttctgcgcttagcgcccactgctggtagcggcggtaaagctgttcgaagcgttgcgcctgttcagggtgggggcgcagagtgcgttctaccgcgctcgccatgctttgctgggcggctggaatgtcggcatggactttcgcagcgacggcggcaaagatagcggcgcctaatgcgcaacactggtcggaagcgacgatctgcaacggacgattcagtacgtcgcagcagacctgcataatgacctgatttttacgggcgatgccgccaagcgccatcacgttattgaccgcgataccctgatcggtaaaacactcctgaatggcgcgcgcgccgaaggcggtcgaagcgaccagaccgccaaacagcgctggcgcgtcggtggcgagattgagatcggtaatgacgcctttcagacgctgattagcgtttggcgtgcggcgaccgttaaaccagtcgagcaccaccggcaggtgatccagggacggatttttcgcccaggcgtcggtgagcgctggcagtagctgcttctggctggcgttaatctggggtttcagttccgggtgctgcgcggcaagttgctccagcggccagctcaacacgcggctaaaccaggcgtagatatcgccgaaagcagattgccccgcttccagaccgataaagttcggcaccacgctgccgtcaacctgaccgcaaatgcctttcacggcgcgatccccgacgctctgtttatccgcaatcagaatgtcgcaggtagacgtgccgatgactttcaccagcgtattgggctgtgcgcccgcgccgaccgcgcccatgtgacagtcgaacgcgccgccggaaatcactacgctttccggcaagtcgaggcgctgcgcccattcggcgcacagggtgcccacgggcagatcggcggtgaaggtttcgctaaataacgggtagcgcagatgacggttaatgcacggatcgagttcatcaaagaagctcgcgggcggcagaccgccccagctttcatgccacagcgttttgtgcccggcgctgcagcggccacggcggatatcctgcgggcgagtggtgccggaaagcagcgccggcacccagtcgcacagctcaatccacgagacggcggcctgcgcgacggcgctatcctgccgggtgacgtgcagaatcttcgcccagaaccattcgctggagtaaatgccgccaatatagcgggagtagtcgaccttgcctggcttatggcacagacgagtgatttcgtcggcctcttccacggcggtgtgatctttccacagcacaaacatcgcattcgggttctcggcgaactctggacgcagcgccaggacgttaccgtcggcgtcaatcggcgctggcgtagagccggtgctgtcaacgccaatgccaacgacatttgcgcgttgcgcggcgcttaattgtgccagaacggctttcagcgcggcctccattgactccatgtagtcgcgcggatgatgacggaactggttgttcgggccgtcgcaataacggccttcttgccagcgcggataccactctacgctggtggcgatctcgtcgccggtggcgcagtccactgccagagcgcgcactgaatcactgccaaaatcgaggccaattgcaattgccatcgtcttactccatccagaaaaacaggtatggagaaacagtagagagtcgcggcaaaaaccgtcaggcaggatccgctaatcttatggacaaaaatgctaatgctttgcaaagtgtgacgctgtgcaaatattcaatgtggacattccagccatagttatagacacttctgttacttaattttatcgcctgaactgtacgcttttgttacaaagcgcttttcacaagcggggttgatacgtgctttcatcaagcgcaaagtcttgcggagacggaagctctgtcgtcctggtcgatatggacaatttgtttcttctctgaacatcggggggtagagaaatcatggctgaaacgcaaaatgatccgctattgccgggatattcatttaatgcccatctggtcgccgggctgacgccaattgaagcgaatggatatctggatttttttatcgatcgtccgttgggcatgaagggatatattcttaacctgaccatccgcggagagggcgtcattaataataatggcgagcagtttgtctgtcggcctggcgatatattattgtttccgccgggcgagattcatcactatggacggcatccggacgccagcgagtggtatcaccagtgggtttatttccggcctcgcgcctactggcaggagtggctgacctggccgacaatctttgcccagacaggatttttccgcccggacgaggcgcgccagccgcatttcagcgaactgttcgggcagatcatcagcgccgggcaaggggaaggtcgctattctgagctactggcgatcaatctgctggagcagttgttgctcagacgtatggcggtaattaatgagtcgttgcacccgccgatggatagccgtgtgcgcgatgcctgccagtatatcagcgaccatctggcggacagccattttgatatcgccagcgtcgcccagcatgtctgcctgtcgccctcccggttatcacatctgttccgccagcagttaggcattagcgtattgagctggcgcgaagatcagcgtatcagccaggcgaaacttctgcttagcactacgcgaatgccgatagcgaccgttgggcgcaatgttggatttgacgatcagctctatttttcgcgggtatttaaaaaatgcaccggggcaagtcctagcgagttcagggccggatgtgaataaaaagtgaatgatgtgtccacaaagatgtcataagccgtaactattcggataattgacggcttgacgaagggggacggggtaagcagaatccctgcttcatcacgctgacggacacactatgcaagcactgctggaacactttatcacccaatccactctgtattcgctcatcgccgtgttgctggtcgccttcctggaatcgctggcgctggtggggttgattttacccggcacggtactgatggcggggctgggcgcgcttatcggcagcggcgagctcaatttttggcatgcctggctggtgggtattatcggctgtctgatgggcgactggatttcgttctggctggggtggcgctttaaaaagccgctacaccgctggtcttttatgaaaaagaacaagtcgctgctggataaaaccgaacacgcgctgcatcagcacagtatgttcacgatcctggtcggacgttttgtcggtccgacgaggccgctggtgccgatggtggcagggatgctggatcttcccgtggcgaaatttattgggccgaacttgattggctgtttgctgtggccgccgttttatttcctgccgggcattctggcgggagcggcaatcgatattccttccgatatgcagagcggagatttcaaatggctgctgctggcgacggcgttgctgctgtgggtcggaggctggctatgctggcggctgtggcgcagcggcaaagcggcagtcgatcgtttaaccgcgtatttcccccgcagccgtttgctgtatctggcgccgttgacgctcgggatcggcgtggtcgcgctggtggtgctggttcgccacccgctgatgccggtatatatcgatattctgcgcaaagttgtgggttactaacgattcctttgccggatggcagcttcgccttatccggcctacaaaatatgggatttgatgcccaatagcgctgaggcgctggcttgaccgcttagtagctcgtctgttttgccttgccacgcgatacgcccgtcggccacgacgattgaccggggcgcaattcgcgccgcatcttccacgctgtgcgagaccatcaacagcgtgagctgtcgctcgcggcagatatcgctgaccaacgtcagcatctcctggcgcagcgcgggatcgagcgcggagaacggttcatccagcagcagtaccggctgttcgcgtaccaggcagcgcgccagcgctacccgctgacgctggccgccggacagttcgcccggtaaacgcgtcatcagactctcaatgcccatctgatgtgcgatagcgtcccgtttttcccgctggctggcgttgagcgttaacccagggtttagccccagaccgatattttgctgcacattcaggtggctgaataaattattctcctgaaacagcattgagaccggacggcgtgagggcggcgtaagcgtatgatcgtcgccggcaatcagtagcgtaccgctggcaggcgcaagaaaaccggcaattaaattcaacaacgtgcttttccccgcgccgctggggccaagaatcgccacctgctcgccgcgttctaccgccagcgtaaaacgcatcggcaaatgatggtaaagccaggtgatatcaatcagttttagcatgtcggcccggtagtttctctatgagggtaaataacgtaaagcagagcagcagcagtatcagcgcggtcactgcgccgtcctggctgcggtaggagccgatctgctgatacagataaaacggcagcgtgcggaaattgtcattgccgaaaagcgcgacgacgccaaaatcaccgatagaaagtacgcaggcaaacgccagcgcctgcgccagcggacgtttcagcgcccgcagttccacgatctttaaccgcgaccagccttcaattcctaatgactggcacagcattccataacgggcggtaatatcgcgcattgggttttccaggacttttagcgcgtaggggattgccatcagcgcattggtgaaaatcacgatgccgtcggcggattccggtaagccaacgctgttattgagcagtaaaaagaagcctgtcgccagcacgatccccggcatcgcgaggatcaacattccgctgagttccagcgtttgtccggcgaatagttgctggcgttggcgtagctcgcggctactccacagcagcatcatggtcagcaccacacacagaacgcccgccgccagcgcaatgcgtagcgatgtccagacagcctgccacagaatgggttgcgccagcacctccggcaggctgcggttgacgccatcgaccaccacggcgaccagcggcggaagcagcagcagcagcgccagcacgattaataaggcgtccgtcagacggctgtggagacgatcgtcaggatcgcgccagccctgcgtcagcgtcatccccggcgcaatcgctttgctcaaccgttggcttagcagtaccagcgccaggcagcagaccatctggattaatgccagcatcgccgcgcgggcgggatcgtagtcataactgagcgcctgaaagatagccagttcgatagtggtggcctgcgggccgccgccgagcgacagaaccgttgcgaaactggcgaagcagagcataaaaatcagcgccgcgacaggcggaatttggcggcgcagccacggccattcgacaaaacggaaaaaatgccagccgcgcataccgagctgggcggcgagctggcgctgctcgccgggaatgctttccaaagattgcagcaacaaacggctcgccattggcaggttaaaaaagacgtgcgccagtaaaatgccctgcaagccgtagggggagaatgtccactgaagccccagcatctgccacagcgaggccagccagccctgacggccatacacgctaagaatgccgaacacggcaaccagtaccggcagaatcagcgtcatggcgcacagacgcagcagcgccagacgtccaggaaaacggcgtcgataaagcgcgcgggcgagaaaaaccgccgggaccacagacagcactgcggacagaaacgcctgccagaatgagaagcgcaccacatgccacaggtagctatcccgccagattgtcgaccacgcgcccgacggcgcattcagccaaagcgccagaaaggccgccagcgagacggttatcatcagcgcggcggcgcacagccccggaatcagccagccgggaattaacggctgacggcgcgttgccattcgctaatccatgcctggcgttgtgctgccacttgttgcggcgtgaattccagcgttgtggcgggtttggccaatgattcaaaccctgcgggtaaggcgacgtccgctaccgggtacatccagttgccggtgggtatggcgttctgaaacgccggagaaaccataaatttgaggaatttctccgccagttccggctgcttactggcgacggtacgcgccgcgacttctacctgtaagtaatggccttcgctgaagttcgcggcggcgtaattgtccttcttctcttcaataatgtgatacgccggagaggtggtgtaactgagcaccaaatcgctttcacctttcagaaataaaccgtaggcctcgctccagcctttcgtcaccgtcaccgttttggccgccagtttttgccaggcctgcggcgcgttatcgccatagactttgcgcatccacagtaacagccccagccctggcgtactggtacgtgggtcctgataaatcacccgccatttttgatcgctctcgaccagttctttcaggcttttcggcggatttttcagcttgcttttatcgtagacaaaggcgaaatagccgtaatcgaatggcacaaatgtgtcgtttttccagccgccgggcaccttgaccgcttcattcgccacgccgcttttggcaaagagtttagtttgcgtggccgcttccagcagattgttgtccagccccaacaccacatcggctttgctgttcttcccctccatccgcaggcggttgagcagcgaaacgccatcctccagcgccaccagtttcagctcgcagttgcaatcggcttcaaacgcttttttcaccgccgggcctggcccccagtcggcggcgaacgagtcgtaggtatagacggtgagaacgggtttggcgaaagcaggcgccgcgcacaggagtaaaagtggaagatatttttttaacactttgcacctcagttaaagagtggcaaaggacttgagaggtagcctcaaatcccttcgccggcattatccggatcaggttcgacgggtattttctcagcgcgcgcatgagcgcggcaccccgttgagttcggcgttagtgtagtgattttgttgccgggcagcaatcaagagctggcgttaaggatctggcggcgcaaaccacgccgatttaaaatcaaaccagccgagggtattcatgcgcagcccgcgcatactgcgctgtccctggataatcagccagtggtggatcaacggcacaatcgctttgttggccagcagttgctggcaccagttcgccaggttcatctcgccagcgcgccactgcgcggcgtcgccctgccagtcgcgcggaatgcagttctgcaagagcggtacttcgcacaagtgcgcgaacagcgagaaatccagcggcagcgtaaagttagcgctattgagccagatatcgctttcgatctcgccggcgtgccattgatcgtagtcgatctcctgaatatgcagatgcacctgatgttcagccagaagcgcgctcatgatacgggcgataacccggtgctcaatgtgttcgcgatagaaggtcagcgtgagggtttccagcccggcgggtttttcgcccgggcctggacgggcgtgatgccagcgcggtaaaagcccataggccgggaaccagagctgctgtagcggttcatcggcatgatagagtaaattggtgggggagaggacgtggcttacccattctctgacctgcggatgtgcgccgcgcggcgttctggcgtcgaatagcaggtaatagcacccctcttccagtcggctttctatcgctttttcaccgccttgtatcggcccttccagcatcaagccgcaggccggttcttcactgatatccggcagtacccagacgttcacttcgtctatcaacgcccgatagccgaagtaatcatcaaaggcgagtatcttgagctggtttggcgtattacgccgcacggcataaggcccggtgccgatagggtggctggcgaaattagccagcgtttcccacttccgcggcaaaatcatcgccgggacctggcccagcagccacggcaaccagcgatccggctgggaaagatgaatatccagcgtccacgcggtaggggagtctatctttgtgatgtgcgagtaaagcggaagcgtattgatacgcgtcagcgaggagatgacatcttccatctccagctcgcggccatgatgaaaatgaatgccggggcgcaggtagaagcgccacagtaaaggggaaatttgctgccagtggtgcgcaatgtccgcttccagttccccgttttcctcatttacccgcgtgagcgaactgaaaatttgccgggcaatatgagtttccgagcgacgtaatgcggttcccggcagaagattgtgcatcggacgatagtaaagaacccgcagaatatgccgcccctggcggaagctgcgtcccagatgggaaatcagcatttgcctgacagcgcttttatcgccgaccagttgtaccagttgatcgattcgatcttgttccagcaggtcttccgcccgctgctgttgcagcgccagtccggtatacaggaacgtcagacgcgaacgctttccgcgtccaacctcggcttcccatgttagccaaccgcgcgcctgcatcgtatttagcagcgtacgcatatggcgacgcgaacagttcagcagatccgccagctcattaagcgtggtgtcttgcgttttaccgtcacaacattgccagagacggataaattgttgttgcaggcgacctgagggcataaaaggggaactccgatgaaaaactcagcaattttattatccctatattaggccaataatatctttcgatgaagcaagaggaagaggtcactatgcgccagttctggttgagatattttgccgcgacggaaaaaacgtcctggctggcttgcctgagcgcaccgcagcgcttaaaaatgctcgcggaactgatgcagtgggaggcgaccgattgaagccaattgcagacatcatgtgtgactgagtattggtgtaggcgatagcctaaaatcacccgccagcagataatatctgctggctttttttatttcggctgtttctggatgacgatgatgggacggcgtttcaacgggatttatacggcggtttctgtggtcacgcaggtggtgaccgggcgagtaaaaatcgtataaaaaatgccggaatatccccggcatgagcgactgatgagtaacccggagcttgatggcgctacgcttatcaggcctacagaatataatggcaaccgggtgatattgcataacctgtaggcccggtaaggcgtcaagggttaccgcataaatgccggttgtttattttcgtaggcggcaatcgcgtcttcgtgctgcagcgtcagcccaatgctgtccagaccgttcaacatgcagtggcggcggaagtcgtcgattttaaagctgtaggttttatcgcctgctttcaccacctgtgcttccagatccacttcaaatttaatgcccggattggctttcaccagggcaaacagctcatcgacctgtgcgtcgctcagggttaccggcagcagttgattattgaaactgttgccgtagaagatgtcggcgaagcttggcgcgatcaccactttaaagccgtaatcggtcaacgcccacggcgcgtgctcgcgtgacgagccgcagccaaagttttcccgcgccaacagtatcgacgcgccttgatattccggaaagttcaacacgaattccggatttggctgttggcccttttcgtccaggaaacgccagtcgttaaacagatgggcgccaaaaccggtgcgcgtaaccttctgcaaaaactgtttagggataattgcatcggtatcgacgttggcggcatccagtgggacaaccaggccggtatgctgggtaaatttctctgccatggtagtttccttatttgatgctgcgaatgtcggcgaagtggccggtaacggcggcagcggcggccatcgccgggctgactaaatgcgtgcgacccccgcggccctgacgaccttcaaagttacggttgctggtggaggcgcagcgctcgcccgggttcaggcggtcgttattcatggccaggcacatggaacagcccggtaagcgccattcaaatcctgcttcgataaagatcttgtccagaccttccgcttccgcctgcgctttcaccggacctgaacccggcaccaccagcgcctgcacgcccggcgcaactttgcgccctttggcgacttccgccgccgcgcgcaaatcttcaatgcgtgaattggtacaagagccgataaagactttatcgatagcaacgtccgttaacggtacgcccggctgtaagcccatataagccagcgctttttcggcgctggcgcgctcaaccggatcgctaaaggaggcgggatcggggatgatgtcggtgacggaaatcacctggcccggattcgtgccccaggtcacctgcggcgcgatctcttctgctcgcagggcgacgacagtatcaaaggtcgcgccgtcatcggttttcagcgttttccagtactcgacggcttcgtcaaaatcgcggcccttcggcgcgtgcaaacgcccttttacgtagttgaaagtggtttcatccggggcgaccagaccggctttggcgcccatctcaatcgccatattgcacagcgtcatgcggccttccatactcagcgcgcggatagcgtcgccgcaaaattcaaccacgtgtccggtgccgccggcgctaccggttttaccgatgatcgccagcacgatgtctttggcggtaatgcccggcgcggcgttgcccgtgacttcaatcttcatggttttagcgcgtccctgtttcagggtttgcgtcgccagtacatgttctacctcagaagtgccgatgccgaaggccagcgcaccaaacgcgccgtgggtggcggtgtgggagtcgccgcagacgatggtcatgcccggcagggtgacgccctgttccggccccatcacatggacgatgccctgatatgggtgattcaggtcatacagctcgacgccgaactcgttacagttcttaatcagctcctgcatctggatacgcgccatttcaccggaagcattaatgtctttagtctgcgtcgagacgttgtgatccatcgtagcgaaggttttccctggctgacgtaccggacgatggtgcgcgcgcagaccgtcaaacgcctgcggagaggtgacttcatgcaccaggtggcggtcgatgtacagcagcggcgtttcgtttggcgcctcaaagaccacgtgggcatcaaataatttttcgtataacgttttggccatgattacaccccttctgcgacatagcgggcgataatatcgcccatctcatcggtactgactgcggcagcgcccctggctaaatcgccggtgcgaacgccctcttctaatgcgcgattgatcgcctgttcaatggccgttgccgcatcgttggcatccaggctgtagcgcagcagcagcgccagtgacaggatctgcgcaattgggttggcgatatttttcccggcgatatccggcgcggagccgccagccggttcatacaggccaaacccttgctcgttcaggctggcggagggcaacatccccattgagccggtgatcatggcgcattcgtcggacagaatgtcgccgaacaggttagagcacagcagtacgtcaaactgcgacgggtctttaatcaactgcatggtggcgttatcgatatacatgtgcgcgagttccacatcgggatacgttttcgcgacatcattgacgatttcacgccacaggatagagctttgcagtacgttggctttatcaatagaggtgactttacggcggcgtttacgcgccgattcaaaggcgatacgggcaatgcgctcgatctcaaagcggtgataaacttcggtatcaaaggctttttcgtactgaccgctgccttcacggccttttggctgtccgaaatagatcccgccggtcagctcgcgcacgcacaggatatcgaaaccgttagcggcgatatcggcgcgcaacgggcaaaatgcttccagtccctgatacagtttcgccggacgcaggttactgaataatttgaaatgtttgcgcagcggcagcagggcgccgcgctccggctggctttccgggggcaaattttcccatttcgggccgccgacggagccaaacagaatggcatccgcctgctcgcacccttcaacggtggctttcggcagtggatgaccatgattgtcgatagcaataccgccgacgtcatagtggctggtggttatacgcatatcaaaacggctgcgtaccgcatccataactttcagggcttgcgccatgacttccgggccgataccgtcgcccggcagtacggcaatatgatagttcttcgacattacacggtttccttgttgttctctttattttgagctttgcgttgcaattctttttcaacttcggcggcgcgccagatattgttcagtacgtgcaccatcgctttggcggaggattcgacgatatccgtcgccagcccgacgccgtggaagcggcgaccatgatggttcacgacgatatcgacctgacccagcgcgtctttgccctggcctttggcgttcaggtcgtatttaaccaactcaacgtcgtagccagtgatgcggttaatcgcctgatagatggcgtcgaccggaccgttgccgttcgccgcttcggccttgatctcttcaccacaggccagcttcacggaagcggtggcgatatcgctggagccggactgcacgctgaagtaatccagacggaaatgctctggttcttcttgctgtttattaataaacgccagcgcttccaggtcatagtcgaacacctggccttttttgtccgccagcttcaggaacgcgtcgtacaggtggtccatgttgtagtctgtgtccttgtaacccatctcttccatgcgatgtttcacggcggcacggccagagcgggaggtcaggttcagctgtatctggttcagaccgatggactctggcgtcatgatttcatagttttcgcggttcttgaggacgccatcctggtggatgccggaagagtgggcgaaagcgccgctgccgacaatcgctttgttggctgggatcggcatgttacagatctggctgacggtctggctggtgcgccagatttcgtggtgattgatgttggtgtgtacgttcatgatgtctttgcgcactttaatcgccatgatcacttcttccagtgcgcagttaccggcacgttctccgataccgttcatcgcgccttcaacctgacgcgcgcccgcatgtactgccgccagcgagttgcctactgctatccctaaatcgtcgtgggtatgaacggagatgatagctttgtcgatattggggacacgttcatacaggccggaaatgattcccgcaaactcaaacggcatggtatagcccacggtatcgggaatattaatggttctcgcgccggcgtttatagcggcttccaccacgcgcgccagatcgtcaacaggcgtccggccagcatcttcgcaggagaactctacgtcatcagtgtaattacgcgcccgcttaaccatgtataccgcgcgttcgataacctcatccagcgtgctgcgcagcttggtggcgatgtgcattggcgaggtggcgataaaagtatggatgcgaaacgcgtcggcgaccttcagcgcctgtgccgcgacgtcgatgtctttttctacacaacgcgccagggcgcaaacgcggctgtttttaatggtgcgggcgatggtttggacggattcaaaatcacccggagaagagaccgggaagcctacttccatgacatcaacacccatgcgctcaagggccagggcaatctgcagcttctctttcgcgctcaggctggcctgtaacgcttgttcgccgtcgcgtaaggtcgtatcaaaaataatgacttgctggctcatgatgtggtccttgtctccaggggcgccttgcgtcaggcataaaaaaacccgcgcaacggcgcgggttttgtttgacttcgagctgacttaatgttgaatgccgcccaccggtctaccgcgcacaataaatgcgttgagtagtagtagcccagtgaaacgaacgatatgtgacattaattcagctccagcgaatgcgttatgcttttagtggtactggatatgccgtttaatgtcaactctattttctgtcgccattgcattttgttgacgatatccggatacgtactttagctaattgtgctgggctgcgcgtccaataaaggataaaagaacgagtggacattcatacttttcattgtttgaaatatttaggcatttttgtttgcaaattggttaggggaatggcctgttaaaggtatgctaaaggtttggtttatctttttgatttgttttatattttaacaaataaccttgtttgcttaatggataaggataaagttattgataaattaatgttaactttttagctattaataatataaacatttaattgaaacttaaatgatcattcacttggtgtatgattgtgtattcgccatagttatggttatattgcttgcgtaatttaaacattatgaatcgcaatggtgtgactcaggacacattacgcttgcgctggcattctatttgtctctgtcagcgtctttatgttttccgaattttaacgctttccctttttcttattttatatgcatggtaaatcatattttcaggaattatttctgccttcagccagaaaaagggagttaagcgtgacagtggagttaaatatgccagaggtcaaaaccgaaaagccgcatcttttagatatgggcaaaccacagcttcgcatggttgatttgaacctattgaccgtgttcgatgcggtaatgcaagagcagaatattacgcgcgccgcccacacgctgggaatgtcgcagcctgcggtcagtaacgccgtagcgcgtctgaaggttatgtttaatgacgaactttttgttcgatatggacgaggaattcagccgactgcccgtgcatttcagttatttggttcagtccgtcaggcgttgcaattggtgcaaaatgaattgccgggatcggggtttgagccgaccagcagcgaacgtgtattcaatctttgcgtgtgcagtccgctggataatatcctgacgtcacagatttataatcgtgtagaaaaaattgcgccaaatattcatgtcgtttttaaagcgtcgttgaatcagaatactgagcatcagttacgctatcaggaaaccgagttcgttattagttatgaagaattccgtcgtcctgagtttaccagcgtaccgctatttaaagatgaaatggttttagtcgccagccgaaaacacccgcgtattagcggcccgctactggaaggcgatgtttataatgaacaacatgcggttgtttccctcgatcgttatgcgtcatttagtcagccgtggtatgacacgccggataaacagtcgagcgtggcttatcagggcatggcgcttatcagcgttctgaacgtggtttcgcagacgcatttggtcgctattgccccgcgctggctggcggaagagtttgcggaatcgctggatctgcaaatattgccgttgcctttaaaactgaatagccggacatgctacctttcctggcatgaagcggctgggcgtgataaagggcatcaatggatggaagatttattagtctctgtttgtaagcgataaaaccgggcagaataaatcagaaacaaattctggtttattctgctttttagcgtatatcaaaaattttatgctgaattaacggtgagcgatgcttttcgtcgctgtgaaaaatagatgaattgctgtaagtctgcatttataagcgattatttattaccaggtgtgattcagacggagtatttctccatttcttctcttcttgcctcctgattattctaaccttccccatctttacgtcattccacccaattgccaggcgtgatagcgagcggttaaggtgtccgtcaaaccgtgatgacaggtataaagtggaggcaagccgtggaaatgttgtctggagccgagatggtcgtctgatcgcttatcgatcaaggcgtaaagcaggtgttcggctatcctggaggcgcagtgcttgatatttatgatgcgctacataccgttggagggatcgatcatgtgctggtgcgtcatgagcaggccgcggtgcatatggcggatggcctggcgcgagccactggcgacgttggcgtggtgctggtgacttccggaccgggagcgaccaatgcgattaccgggattgctacggcctatatggattccattccgctggtgattctttccggccaggtcgccacctcattgattggctatgatgcctttcaggagtgcgacatggtggggatttcccgaccggtggtcaaacatagcttcctggtcaaacagacggaagatattcccctggtgcttaaaaaggccttctggctggcggcaagcggacgtcctgggccggtggtcgtggatttgccgaaagatattttgaatccggcgaaaaaaatgccgtatgcctggccggagacggtcagtatgcgctcttacaatcccacaacatcaggacataaaggacaaattaagcgtgccttgcaaacgctggcgtcggcaaaaaagccggtggtctacgttgggggaggggcgataagcgcggcctgctatgcgccgttgcgccacatcattgaaacctttaacctgccggtggtctcttcattaatgggactgggcgcgtttcctgctactcatcgccagtcgttaggaatgctgggaatgcatggcacttatgaagccaatatgaccatgcataacgccgacgtgattttcgctgttggcgtacgatttgacgaccgcacgacgaataatctcgctaaatattgtccgaacgcgacggtattacacatcgacattgacccgacgtccatatccaaaacggttaacgctgatatcccggtggtgggcgatgcccgcctggtactggaacaaatgctggagctactggcgcaggatgcgccgtctcagccgcaggatgatattcgcgactggtggcagcagatagagagctggcgcgcccgtcagtgcctgaaatatgacgcggaaagcgaaagcattaaaccccaggcggtgattgaaaccctctggcgtctgacgaagggcgatgcgtacgtgacgtccgatgtaggacaacaccagatgtttgccgccctctattacccgttcgataagccacgtcgctggattaattccggcgggctcggcacgatgggttttggcctaccggctgcgctgggcgttaaaatggccctgccgaaagaaatggtggtctgcgtgaccggcgatggcagtatacagatgaacattcaggagctgtcgacagccttacagtatgaactgccggtactggttttgaacctgaacaaccgttatctggggatggtgaaacagtggcaggatatgatctattccggtcgccattctcagtcttatatgcagtcgttaccggattttgtgcgcctggcggaagcatatggccatgtcgggctgcagattaaccgtccggatgagctggaaagtaaactcagcgaagcccttgagcatgtgcgtaataaccgactggtgttcgtcgatgtcaccgttgatggcagcgagcatgtctatccgatgcagattcgcgggggcgggatggacgaaatgtggttaagcaaaacggagaggacctgatgatgcgccggattttatcggtattactggaaaacgaatctggggcgttatcgcgggttatcggcctcttttcgcaacgcggatataatattgaaagcctgaccgtcgcgccgacagacgatccgacgttgtcgcgcatgactatccagacggtaggcgatgaaaaagtgcttgagcaaattgaaaagcaactgcacaagctggttgatgtgctgcgcgtcagcgagctgggacagggagcgcacgttgagcgggaaatcatgctggtgaaaatccaggccagcggctacggacgggaagaggtgaagcgtaatacggaaattttccgtggtcagattattgacgttacgccaacgctgtataccgttcaactggcgggcaccagcgataaactggatgcttttctggcctcgctgcgcgacgtggcgaaaattgttgaagtggcgcgttcaggcgtcgtcgggctttcgcgcggcgataagattatgcgctgagcagattcgccggatgacgacgcgcgtgcgttttatccggtctactggctgatatctggcccaggtccgataagcgtagcgccatcaggcaggtttgccggatatcagccaacaggaattatcgcccaacccaatatcatcggttgggcttttttttgcgaaatccgtggtaacccggaataaaagcggttgccggagtgatcaaactgcgcttagatgttaacgattttaacccatgccgacataaaggttatggtttgtacaatttacacaaggggcaattgtgaaactggatgaaatcgctcggctggccggtgtctcgcgcacaactgcaagctacgttataaacggtaaagcaaagcaataccgcgtgagcgacaaaaccgtagaaaaagtcatggcggtagtgcgtgagcacaattaccatcctaacgctgtggctgccgggctgcgtgctggacgcacacgttccattggtctggtgatcccggaccttgaaaacacgagctacacccgtatcgcaaactatcttgagcgccaggcacgccagcgtggctaccaactgctgatcgcctgttctgaagatcagccggataacgaaatgcgctgcattgagcaccttttgcaacgccaggtggatgcaatcattgtttcaacttcgttaccgccggagcatcccttctatcagcgctgggccaacgatccgttccccatcgtcgcgctcgaccgcgcgctggatcgcgaacatttcaccagcgtggtcggcgccgatcaggatgatgccgagatgttggcggaagagctgcgtaaattcccggcggaaacggtgctttatttgggcgcgctgccggagttgtccgtcagtttcctgcgcgagcaggggttccgcaccgcatggaaagacgatccgcgggaggtgaatttcttatatgccaacagctatgagcgcgaagccgccgcgcagttgtttgagaaatggctggaaacgcatcctatgccgcaggcgctctttacgacatcgttcgcgctattacagggcgtgatggacgtaacgctgcggcgcgatggaaaactgccttcggatttagcgattgcgaccttcggcgatcatgagctgctggattttctgcaatgcccggtactggcggtggcgcagcgtcatcgtgatgtcgcggaacgcgtgctggagattgtgctggcaagtcttgatgaaccgcgtaaaccgaaacccggcttaacgcgtattcggcgaaacctttatcgtcgcggcattctgagccgtagctaaaggaccggcggtaaaagactctctcttctgccgccgtcaaacaaatgcgtatcagtaaaaatatcccttaaataattaagattattccttaaaattatccgaaaattcttttttattacctttcttttgtccgaaatcgtccacattccactaattaagacgtaacgagtcttttcctttgtattgttttgttacaagcaggcaagaaatcgtcgaattaacagccactttttgtctttggcgcgacagtcgctcgtaggcgctggtatagcaggcaccgcacacgttaaacaggcactgttaacacggtgcaatatgtcctaaaatgccgctcgcgtcgcaaactgacactttatatttttctcggattatattgagtccgttttaaacggcggtgggcctttggtttttttcttacaaatattcataacgttaatttggcttgcacgctgggcggaaattaatcaacgcagatattcgccgtaaacattggcttttttacttaggtaagcgttgtgacttgcttgacaagcttttcctccgctccgtaaactccttcgagtgggaatttgtgggataaagtggtaagaaggggtgagactggcatgttccggggggcaacgttagtcaatctcgacagtaaagggcgcctgaccgtgccgacccgttatcgggagcaactgatcgagagcgctaccggtcaaatggtatgtaccattgacatccatcacccatgcctgctgctttaccccctgcctgaatgggaaattattgagcaaaagttatctcgtctgtcgagcatgaacccggtagaacgtcgcgtacagcgtttactgttgggccatgccagcgaatgtcagatggatggtgcaggtcgattactgatcgcgccagttctgcggcaacatgccggactgacgaaagaagtgatgctggttggacagttcaacaaatttgagctgtgggatgaaacgacctggtatcaacaggtcaaggaagatatcgacgctgaacagtcagctaccgaaacgttatcggagcggctgcaggacttgtctctataagatgatggaaaattttaaacacactacggtactgttggatgaagccgttaatgggctgaatattcgtccggatggtatctatattgatggcacatttggtcgcggcggccactcgcgcctgatcctctcgcaactgggcgaagaggggcgcttgctggcgatcgatcgcgatccgcaggcgatcgccgttgcgcagaccattaatgatcctcgcttctccatcattcatggacctttttccgcgctggctgattatgtagccgagcgcgagcttaccggcaagattgacgggatccttctcgatcttggcgtctcttctccgcagcttgacgatgcggagcgcggtttttcatttatgcgcgacggtccgctggatatgcgaatggacccgacgcgcggccagtctgccgccgagtggttacaaacggcggaggaagcggatatcgcctgggtgctgaaaacattcggcgaggagcgttttgccaaacgtattgctcgcgccattgttgagcgcaatcgcgaacagccgatgacccgcaccaaagagctggcggaagtggttgcggcggcgaccccggtaaaagacaaattcaaacatcccgcgacccgtaccttccaggcggtgcgcatctgggtaaacagtgaactggaggagatagagcaggcgctaaaaagctcgctcagcgtactggccccaggcgggcggctttcaatcatcagtttccactcgctggaagaccgtattgtgaaacgctttatgcgtgagcaaagccgcggtccgcaggtaccggcgggattaccgatgacggaagcgcagctcaaaaaactgggcggtcgtgagttacgagcgttaggcaagttgatgccgggtgaaaaagaggtagctgaaaatcctcgggcccgtagttcagttctgcgtatcgcagagaggacgaacgcatgatcagcagagtgacagaagccctaagcaaagtgaagggatcgataggaagcaacgagcgccatgccttgcctggcgtgatcggtgacgatcttttgcggttcgggaagctgccactctgcttgttcatttgcatcattttaacggcggtgacggtggtcacgacggcgcaccatactcgtttactcaccgcgcagcgtgaacaattggttctggagcgcgatgcattggacattgaatggcgcaacctgatccttgaagaaaatgcgctcggcgatcacagccgggtggagcggatcgcaacggaaaagctgcaaatgcagcatgttgatccgtcccaagaaaatattgtagtgcaaaaataaggataaacgcgacgcatgaaagcagcggcaaaaacgcaaaaatcgaaacgccaggaagaacagaccaacttcatcagttggcgttttgcgttgctgtgcggctgtattttactggcgctggtttttttacttggacgcgcggcgtggctacagattatcgccccggatatgctggtgcgtcagggcgatatgcgttcgctgcgtgttcaggaagtctccacctcacgcggtatgattaccgaccgttccgggcgtccactggcggtcagcgtaccggttaaggcgatctgggccgacccgaaagaagttcatgacgccggcggcatcagcgttggcgatcgctggaaagcgctttctactgcgctcaatattccactcgatcagctctccgcccgtatcaacgccaacccgaaagggcgttttatttatctggcgcgccaggtaaatcctgacatggcggactacatcaaaaaactcaaactgccggggattcatttgcgtgaagagtcccgccgctactacccgtcaggagaagtaaccgctcacctcatcggttttaccaacgtcgacagtcaggggattgaaggcgttgaaaagagctttgataagtggcttaccggtcagcctggcgagcgaatcgtgcgtaaagaccgctatggccgcgtgattgaggatatctcctccactgacagtcaggcagcgcacaatctggcgttaagcattgatgaacgcttacaggcgctggtttaccgcgaactgaacaacgcggtggcgtttaacaaggcggaatccggtagcgcggtgctggtcgatgtcaataccggtgaagtactggcgatggcgaatagcccttcctataaccccaacaaccttgccggtacgccgaaagacgcgatgcgtaaccgtaccatcaccgacgtgtttgaaccgggttctacggttaagccgatggtggtgatgactgcgcttcagcgcggtatcgtcaacgaaaatacggtgttgaataccgttccataccgaattaacggccacgaaattaaagacgtggcgcgctacagcgaattaaccctgaccggggttctacagaagtcgagtaacgtcggtgtatccaaactggcgttagcgatgccgtcctcagcgttagtagatacttactcacgttttgggctaggaaaggcgaccaatttggggttggtcggagaacgcagtggcttatatcctcaaaaacaacggtggtccgacatagagagggccaccttctctttcggctacgggctaatggtaacgccgttacagttagcgcgagtctatgcaaccatcggcagctatggcatttatcgcccgctgtcgattaccaaagttgatccgcctgtacccggcgaacgcatcttccctgaatccaccgtacgcaccgtggtgcatatgatggaaagcgtggcgctgccgggcggcggcggcgtgaaggcagcgattaaaggctaccgtatcgcgattaaaaccggtacggcgaaaaaagtggggccggacggtcgctacatcaacaaatacattgcttacaccgcaggcgtcgcgcctgcgagtcagccgcgcttcgcgctggtggttgtcatcaacgatccgcaggcgggtaaatactacggcggcgccgtttccgcgccggtatttggtgccatcatgggcggcgttctgcgcaccatgaacatcgaaccggacgcgctggcaacgggcgaaaaaaatgaattcgtaattaatcaaggcgagggaacaggtggcagatcgtaatttgcgcgaccttcttgctccgtgggtggctggactacccgcgcgagaactgcgagagatgacgctcgacagccgtgtggctgcggcgggcgatctctttgtggcagtggtgggtcatcaggcggacgggcgtcgatatatcccgcaggcgatagcgcaaggcgtagctgccattattgcagaggcgaaagacgaggcgagcgacggtgagattcgcgaaatgcacggcgtaccagtcgtctatctcagccagctcaatgagcgtttatctgcgctggcgggccgcttttaccatgagccatctgaaaacatgcgtctggtggcggtgaccggcaccaatggcaagaccaccaccacccaactactggcgcagtggagccagttgctcggcgaaaccagcgcagtgatgggaacggtaggcaacggactgttgggtaaagtgatcccgacggagaacacaaccggttccgctgtggatgttcagcatgtgctggccagtctggttgcgcagggcgcgaccttcggcgcgatggaagtctcttctcacggcctggtgcagcatcgcgtggcggcgttgaaatttgccgcctccgtgtttactaatttgagccgcgaccatctcgactatcatggcgatatggcgcattacgaggcggcaaaatggatgctttattccacccaccatcatggtcaggcaatcgtcaacgccgatgatgaagttggacgccgctggctggcgtcgctacccgatgcggtcgcggtatcaatggaagggcatatcaaccctaactgtcacggtcgttggctgaaagcggaggcggtggagtaccacgaccgcggagcgacgattcgttttgcttcaagctggggtgaaggcgaaatcgaaagccgcttgatgggcgcgtttaacgtcagcaacttactgctggcattggcgacgctactggcgctgggctatccgttaacggatttgctgaaaaccgccgcgcgtttgcagccggtttgcgggcgtatggaagtgttcactgcgccaggcaaaccgacggtggtggtggattacgcgcacacgccggatgcgctggaaaaagcgttgcaggcggcgcgtctgcattgcgccggaaaattgtggtgcgtctttggctgtggcggggatcgtgacaaaggtaagcgcccactcatgggggccattgccgaagaattcgcggatatcgtcgtggtgactgacgataacccgcgtaccgaggagccgcgcgccattatcaacgatattctggccggaatgctggacgccgggcaggtcagggtaatggaaggccgcgctgaggcggtaaccaatgccattatgcaggcaaaagacaatgacgtcgtgctgattgcaggtaaagggcacgaggattaccagattgtcggcacgcagcgtcttgattattcagaccgcgtgaccgcagcgcgtttgctgggggtgatcgcatgattagcgtaacgctcagcaaaattgccgatgtccttggcgccgaacaccgcggggcggatctcacgctcgatacggtcattaccgacacacggaaagtgacgccgggatgcctgttcgtggcgctgaaaggggaacgctttgatgcgcatgattttgctgataaagcaaaagcgaacggcgctggcgccctgctggtcagtcgtcctctggatatcgatctcccgcaggtgattgtaaaagacacgcgtcaggcatttggccaactggccgcctgggtacgtatgcaggtaccggcgcgggtggtggcgttaaccggttcgtccggcaaaacctcggtcaaagagatgaccgccgcgattcttagccagtgcggaaatactctgtataccgcaggcaattttaacaacgacatcggcgtgccgataacgctgctgcgcttaaaccatgattatgactatgcggtaatcgagttaggcgctaatcaccagggagaaatcgcctggaccgttagcctgacgcgcccggaagcggcgctggtcaataacctggcggcggcgcatctggaaggcttcggctcgttggccggcgtggcgaaagcgaaaggcgaaatctataccggtttgcctgagaacggtatcgcgattatgaatgccgataataatgactggctgaactggcaaagcattattggcgatcgtctggtgtggcgcttttcgccgaatgcggcaaacagcgactttaccgctgcgaatatccacgtgacgtcacacggtaccgaatttaccctgcaaacgccgatgggcagcattgatgtgctgctgccgttgccggggcggcacaatattgccaacgcgctggcggccgctgctttatcaatggcggtgggggctacgctgacggcgattaaagcagggctggcggcgttaaaagccgtacccgggcgtctgttcccgattcagctaagtgaaaaccaactggtactggatgacgcttataacgccaacgttggttcgatgaccgccgcagtgcaggtcctttctgaaatgcccggctaccgcgtgctggtggtaggcgatatggccgagctgggcgcagaaagcgaagcgtgccacctccaggttggtgaggccgcaaaagcggcgggtattgatcgcgtgttaagcaccggaaaactcagtcaggctatcagccacgccagcggcgtcggcgaacattttgccgataaagccgcgctcattgcgcgtttacacgctctgcttcaggagcaaccaatgatgactattttagtgaaaggatcacgcagcgccgcgatggaagatgtggttcatgcgttacaggagaaaggttcatgttagtttggctggccgagcatttggtcaaatattattccggctttaacgtcttttcttatctgacgtttcgcgccatcgtcagcctgttgaccgcgctgttcatctctttatggatgggcccgcgtatgatcgctcgtctgcaaaaactctcttttggccaggtggtacgtaacgatggcccggaatcgcacttcagtaaacgcggtacgccgacgatgggcggcatcatgatcctgacgtcgattgtgatttccgttctgttatgggcttacccgtctaacccgtacgtctggtgcgtgctggtggtattgatcggctacggcattatcggttttgtcgatgactaccgcaaagtggtgcggaaagataccaaagggctgattgcgcgctggaaatatttctggatgtcggttatcgcgctcggcgtggcctttgcgctttatctcgtcgggaaagacacgcccgcgacccaactggtggtgccgttctttaaagatgttatgccgcaattggggctgttttacattctgctgtcctactttgtcatcgtcggtacgggtaacgccgtgaacctgaccgacgggcttgatggtctggcgattatgccgactgtcttcgttgccgccggctttgcgctggtggcctgggcgaccgggaacatgaacttcgccaattacctgcatattccgtatttacgccatgcgggcgagctggtgattgtctgtacggcgattgtcggcgcgggattaggattcttgtggtttaacacctatccggcgcaggtttttatgggcgatgtcggatcgctggcgttgggcggtgcgttgggcattatcgccgtgctgctgcgtcaggaatttctgctggtgatcatgggcggcgtctttgtggtggaaactctgtcggtcatcctgcaggtgggttcctttaaactacgcggacagcgtattttccgtatggcgcctatccatcaccactatgaactgaaaggctggccggaaccgcgcgtgattgtgcgcttctggattatttcgctgatgctggtgctgattggcctggcaacgctgaaggtacgttaatcatggctgattaccaggacaaaaacgtcgtcattattggtctgggcttaaccggactctcttgcgtggacttttttctcgcccgcggcgtgacgccgcgggtgatggatactcgcgtgacgccgccgggtctggataagctgccgcaagaggttgagcgtcacgttggcggcctgaacgacgagtggctcttagcggcggatttaatcgtcgccagccctggtattgctctggcgcatccctctcttagcgctgccgccagcgctggagtggaaattgtcggcgatatcgaactgttttgccgcgaagcgcaagcgccgattgtggccatcaccggctcgaacggcaaaagcaccgtgaccaccttagtgggcgagatggcgaaagcggcgggcgtcaatgtcggcgttggcggcaatatcggtcttccggcgctgatgctgctggatgccgatcgcgaattgtacgtgctggaattatccagtttccaactggaaactacctcaagtttgcaagcggcggcggcaacggtgctcaacgtcactgaagatcatatggaccggtatccgtttggtttgcaacagtaccgggcggcgaaactgcgcgtctacgagaaggcgaaagtgtgcgtagtgaatgccgatgacgcgttgacgatgccggtacgcggggccgatgaacgctgcgttagctttggcgtcaatatgggcgattatcaccttaatcgtcagcagggcgaaacctggctgcgagtcaaaggcgagaaggtgctgaacgtgaaagagatgaagctttccggtcagcataactataccaatgcgttagcggcgctggcgctggcggatgccgtaggtctgccgcgcgccagcagtttgaaggcgttgacgacatttaccggtctggcgcatcgcttccagctggcgttggagcataacggcgtacgttggatcaacgactcgaaagcgaccaacgtcggcagtaccgaagcggcgctaaacggtttgcatgtggacggtacgctacatctgctgctgggcggcgacggtaagtcggcagacttttctccgctgacacgctatctgaccggcgatcgtatccgcctgtattgctttgggcgcgatggcgcgcagcttgccgcactgcgtccggaaatcgcccaacagactgagacgatggaagaggcgatgcgtttgctggcgccgcgcgttcagccgggtgatatggtgctgctgtcgcccgcttgcgctagcctcgatcagtttaaaaattttgagcaacggggcgatgtctttacccgtctggcgaaggagttaggttgatgcgtttatctctcccccgtctgagaatgccgcgcgtaccaggctttggcctcctggcctggctgtttgcggcgcttaaaggctgggtgatggcttcgcgcgataaagacgccgacagtctgatcatgtatgaccgcacgctgctatggctgaccttcgggctggcggcgattggttttgtcatggtgacgtcggcctccatgccagtcgggcagcgcctggcgaacgatccgtttttgtttgccaaacgtgatgcgctctatatcttcctggcattttgtctggcgatggtcacgctacgtttgcccatgaccttctggcaaaaatacagcacgacgatgctgattgcgtcgatcattatgctgcttatcgtgttggtcgtcgggagctcggttaacggggcgtcgcgctggattgcgctggggccgctgcgtattcagcctgcggagtttaccaagctgtcgctgttctgctacctcgcgaactatctggtgcgtaaggttgatgaggtgcgaaataacctgcgcggctttttaaaaccaatgggcgtgattctggtgctggcggtgttactgctggcgcagcctgacctcgggacggtggtcgtactgtttgtcaccacgctggcgatgctgtttctcgccggggcgaaattatggcagttcatcgccattatcgggatgggcatctcggcggtgattctgttaatcctcgccgaaccgtatcgtattcgtcgcgttacttcgttctggaacccctgggaagatccgttcggcagcggttatcagctgacgcagtcgctgatggcttttggtcgcggtgagatatgggggcaagggctggggaattcggtgcagaaactggagtatttgccggaggcgcacaccgatttcatcttcgccattattggggaagaactgggttatatcggtgtggtattggcgcttttaatggtattcttcgtcgcttttcgcgcgatgtcgattggccgtaaggcattggagattgaccaccgtttttccggatttttagcgtgttctatcggtatctggtttagtttccaggcgctggtaaacgttggcgcggccgcggggatgctgccgaccaaaggtcttacgctgccgctgatcagttatggcgggtcgagtctgttgattatgtcgacggccattatgtttttattacgtattgattatgaaacgcgtctggaaaaagcgcaggcgtttacacgaggttctcgatgagtggtcaaccgaagcggttaatggtgatggcgggcggtaccggcgggcacgtgttcccgggactggccgttgcgcatcatttaatggcccagggctggcaggttcgctggctgggtaccgccgatcgtatggaagcggatttagtgccgaagcatggcatcgacattgactttattcggatctccggtctacgcggtaaaggcgtaaaagcgcttctggcggcgccgctgcggatttttaacgcctggcggcaggcgcgggcgatcatgaagcggtttaagccggatgtcgtgctgggaatgggcggttatgtttccggccccggcggtcttgccgcatggtcattgggtattccggtcgtcttgcatgagcaaaacggtatcgccgggctaaccaatcagtggctggccaaaatcgcgaccacagtgatgcaggcgtttcccggtgcgtttccgaacgcggaagtggtgggtaacccggtgcgtaccgacgtactggcgttgccgttgccgcaggtgcgtctggccggtcgtgacggcccgattcgcgtgttggtggtcggcggttctcagggggcgcgagtcctgaaccagacgatgccgcaggttgccgccagactgggcgatacggttacaatctggcatcaaagcggaaaaggcgcgcagctcacggtagagcaggcatatgccggggcgggacaaccgcagcataaggtaacggaatttatcgatgacatggccgccgcctatgcgtgggcggatgtagtggtatgtcgttccggcgctttaacggtgagcgagatcgccgccgccgggttaccggcgatattcgtgccgtttcagcataaagacaggcagcagtactggaatgcgctgccgttagaaaacgccggcgcagctaagatttttgagcagccgcagtttactgtagaggctgtcgccgacaccctggcggggtggtcgcgcgaggcgttgttaaccatggcggagcgtgcccgcgcggtatccattccggatgctaccgagcgcgtcgccagtgaagttagccgggttgcccggacataatttgtggcggtgccttttgcatcgcagggtttttctaccctcaataatttgggttgcaggcaagccaacgcatctgcaatttgaagtatggcgggtattggagttaatggcgtaaagaatgaatacacaacaactggcaaaactgcgttccatcgtgcccgaaatgcgtcgcgttcggcacattcactttgtcggcatcggtggtgctggtatgggcggtattgccgaagttctggccaatgaagggtatcagatcagtggttccgatttagcgccgaatccggtgacccagcagttgacgagcctgggggcgacgattttctttaaccatcgtccggaaaatgtgcgtgatgccagcgtggtcgtcgtttccagcgcaatttccgcggataacccggaaattgtcgcggcgcatgaagcgcgtattccggttattcgccgtgcggaaatgctggcggaactgatgcgttttcgccacggcatcgccattgccgggacgcacggaaaaaccacaacgaccgcgatggtgtccagtatttatgccgaagcggggctggacccgactttcgtgaatggcggactggtgaaagccgcaggcgttcatgcgcgtctgggccatagtcgttacctgattgccgaggcagatgagagcgacgcgtccttcctgcatttgcagccgatggtcgcgatcgtcaccaacatcgaagccgaccatatggatacctatcatggcgactttgaaaatttaaagcagacgtttattaacttcctgcataacctgccgttctacggtcgcgcggtaatgtgcgtcgatgatccggtcatccgcgagttgctgccgcgggtggggcgtcagaccacgacgtatggctttagcgaggatgctgacgtccgcgtagaagattatcagcagatagggccgcaggggcactttacgctgttgcgccagggaatgccggatctgcatgtcacgttgaatgcgccgggtcgccacaatgccctgaatgccgcggcggcagtggcggtagcgaccgaagaaggcatcgccgatgacgctatcctgcgcgcgctggaaagcttccaggggaccgggcgtcgttttgacttcctcggcgagttcccgcttgagccggtgaatggtaaagccgggacggcgatgctggtggatgactatggtcatcatccgactgaagtagatgccaccattaaagctgcgcgagcagggtggccggataaaaacctggtgatgctgtttcagccgcaccgttacacgcgcacgcgcgatctgtatgacgatttcgccaatgtgctgacccaggtcgatgcgctgctgatgctggacgtttacccggcgggtgaagcgccgattccgggcgcggatagccgttctttatgtcgtacgattcgtaatcggggaaaaattgacccgattctggtttccgatccggctcaggttgcgacaatgttagcgccggtgctgacgggtaacgacttgatattagtgcaaggcgcaggaaatgttggcaaaattgcgcgttacttatctgaaatcaagctgaagccgcaaatccaggaggaagagcaacatggctgataaaatcgcggtcctgttgggcggaacctctgcggagcgggacgtttcgttaaattccggcgcggcagtgttggccgggctacgtgaaggcggcattaatgcgcatcccgtcgatccgcaagaggtcgatgtcgcgcagcttaaagcaatgggctttcagaaggtctttattgcgttgcatggccgtggcggtgaagatggcaccttacagggaatgcttgaactgctcggcctgccttataccggtagcggcgtgatggcctcggcgctttccatggataaactgcgcagtaaattgctgtggcagggcgcaggcttaccggttgcgccgtgggtcgcgctgacgcgcgctgagtttgaaaaaggtcttagcgaagaacaaaaagcgcgaatttcggcgctgggtttaccgctgatcgtcaaacccagccgtgaaggctccagcgtcggtatgacgaaagtagtagaagaaaatgctttacagggtgcgttatcattggcttttcagcatgatgacgaaatactgattgagaaatggctgtgcggtccggaatttacagtggcgatagttggcgaagaaattttaccgtcaattcgtatccaaccggcaggaaccttctatgattatgaggcgaagtatctctctgatgagactcagtatttctgccctgccggtttagatgcgtcccaggaagccgcgctacagtctctcgtcctgcaggcatggaaagctttaggctgcacgggatgggggcgtattgacgtcatgctggacagcgatggtcagttttatctgctggaagccaatacttctccggggatgaccagccatagtctggtgccgatggcggcgcgtcaggcgggaatgagcttctcgcagttagtggtacgaattctggagttggcggactgatatgtcgcaggctgcgctgaacacgcgaaacagtgatgaagagacgccttcttcacgccgcaataatggaacgcgtcttgcaggaattttattcctgctgacggtactgtgcaccgtgtttgttagcgggtgggtcgtgttagggtggatggaagatgcgcagcgtttaccgttatcaaagctggtattaaccggcgagcgtcactacacgcgtaacgatgatatccgtcaggcgatactggctctgggcgcgccgggaaccttcatgacgcaggatgtgaacattatccagagccagattgagcgtttgccgtggattaaacaggccagcgtcagaaaacagtggcctgatgaattgaagattcatctggttgaatatgtgccgattgcgcgttggaatgatcaacatatggtcgatgctgaagggaacaccttcagcgtgccgtcagaccgcatcggcaaacaggttttacccatgttgtatggcccggaaggcagcgcgagtgaagtgttgcagggataccgcgagatggggcaggtgctggctaaggataaattcactctaaaggaagcggcgatgaccgcacgtcgctcctggcaattgacgcttaataacggcattaagctcaatctcggcaggggcgatacgatgaaaaggttggctcgctttgtagaactctatccggttttacagcagcaggcgcaaaccgatggcaaacggattagctacgttgatttgcgttatgactcaggtgcggcagttggctgggcgccgctcccccctgaggaatctaatcagcaacagaatcaggcacaggcagaacaacaatgatcaaggcgacggacagaaaactggtagtaggactggagattggcaccgcgaaggttgccgctttagtaggggaagttctgcccgacggtatggtcaatatcattggcgtgggcagttgcccatcgcggggtatggataaaggcggggtgaatgaccttgagtcagtggtgaaatgcgttcagcgcgccattgaccaggcggaattgatggccgattgccagatctcctcggtatatctggcgctttccggcaaacatattagctgtcagaatgaaattggtatggtgcccatttccgaagaggaagtgacgcaagaagatgtggaaaacgtcgtgcatactgcgaagtcagtgcgcgtgcgcgatgaacatcgcgtgctgcatgtgattcctcaggagtacgccattgactaccaggaaggcattaaaaatccggtcggtctttccggcgtgcgtatgcaggcgaaagtacatttgattacctgccacaacgatatggcaaaaaacattgtcaaagctgttgaacgttgtggtctgaaagttgaccaactgatatttgccggactggcggccagttattccgtgttaacggaagatgaacgtgaactgggcgtctgtgtcgtggatatcggcggtggtacaatggatatcgccgtttatactggcggcgcgctgcgtcataccaaagtgatcccttacgcggggaacgtggtgaccagcgatatcgcttatgcctttggtacgccgccgagcgatgctgaagccattaaagttcgccacggttgcgcgctgggttccattgtcggtaaagacgagagcgttgaagtaccgagcgtaggcgggcgtccgccgcgcagcctgcaacgccagacgctggcggaagtgattgagccgcgttacaccgagctgctcaatctggtcaacgaagagatattgcaattacaggaacagcttcgccaacaaggggtaaaacatcacctggcggcggggattgtgttaaccggcggcgcggcgcaaatcgaagggcttgctgcttgcgctcagcgcgtgtttcatacgcaggtgcgtatcggcgcgccgctgaatatcaccggtctgacggattatgcccaggagccgtattactcaacggcggtgggattgcttcactacgggaaagagtcccacttaaacggtgaagcagaagtggaaaaacgtgttacggcatcagttggctcgtggatcaagcgacttaatagctggctgcgaaaagagttttaatttttatgaggccgccagatattacggcctcaggcgacaggcacatgacggagagagattatgtttgaacctatggaactaaccaacgacgcggtgattaaagtcatcggcgtcggtggtggcggcggtaacgctgttgaacacatggtgcgcgagcgcatcgaaggtgttgaattcttcgcggtgaataccgacgctcaggcgttgcgtaaaacggcggttggccagaccattcaaattggtagcggcattaccaaaggtctgggcgctggcgctaacccggaagtcggtcgtaacgcggcggacgaagaccgtgaagcgctgcgtgcggcgcttgaaggcgcagacatggtatttatcgcggcaggcatgggcggcggtaccggaaccggcgcggcgccagtggttgctgaagtggcaaaagatttaggtattctgaccgttgccgtggtgactaagcctttcaattttgaaggcaaaaagcgcatggcatttgcggagcagggtatcaccgagctgtccaagcatgtggactcgttgatcaccatcccgaacgacaagctgctgaaagtgctgggccgtggtatctccctgctcgacgcgttcggcgcggctaacgacgtgctgaaaggcgcggttcagggcatcgcagagctgatcacccgcccgggtctgatgaacgtcgactttgctgacgtgcgtaccgtgatgtctgaaatgggctacgcaatgatgggctccggcgtggcgagcggtgaagaccgtgcggaagaagcggctgaaatggctatttcttctccgctgctggaagatatcgacctgtccggcgcgcgcggcgtgttggtcaacattactgcgggcttcgacctgcgtctggatgagttcgaaaccgtcggtaacaccatccgtgcctttgcatcggataacgccaccgtggttatcggtacttctctggacccggatatgaacgacgaactgcgcgtgaccgttgttgccactggaattggtatggacaagcgtcctgaaatcactctggtcaccaataaacaggtgcagcagccggtgttggatcgttatcagcagcacggtatggcgccgctgacgcaggagcaaaaaacggtcgcgaaagtggttaacgacaatacaccacaggcggcgaaagagccggattatctggatatccccgcattcctgcgtaagcaagctgattaagaattagctggaatttgggattctgggctctttgtgctaaactggcccgccgaatgtatagtacacttcggttggataggtaatttggcgagattatacgatgatcaaacaaaggacacttaaacgtatcgttcaggcgactggcgtcggtttacacaccggcaaaaaagtcaccctgacattacgccctgcgccggccaataccggggtcatctatcgtcgcaccgacttgaatccaccggtagatttcccggccgatgccaaatctgtgcgtgataccatgctctgtacgtgtctggtgaatgagcatgatgtacggatttcaaccgttgagcacctgaatgctgctctggcgggcttaggtatcgataacatcgttattgaggttaatgccccggaaatcccgatcatggatggcagtgccgctccgtttgtctacctgctgcttgatgccggtattgatgaactgaactgcgccaaaaaattcgtacgcatcaaagagactgttcgggttgaagatggcgataaatgggctgaattcagaccgtacaatggttttacgttggatttcaccatcgactttaaccatccggcgatcgattccagcagccagcgctacgcgatgaacttctctgcggatgcgttcatgcgccagatcagccgtgcgcgtaccttcggttttatgcgtgatatcgaatatctgcagtcccgcggcctgtgcctgggcggcagcttcgattgtgccatcgttgttgacgattatcgcgtattgaacgaagacggcctgcgttttgaagatgaattcgttcgtcacaaaatgcttgacgcgatcggtgacttgttcatgtgtggtcacaatattattggtgcgtttaccgcgtataaatccggtcacgcattgaataataaattgttacaggcagtcctggcaaaacaggaagcctgggaatttgtgaccttccaggacgacgcagaactgccgttggctttcaaagcgccttcgacggtactggcataacgacatacgctgtcgtataaaattcgactggttaacctggcactctctccggccaggcgagccagtcgtttttttactatcctttatctgcgctttccttaatacagccattttgacagggttaaatggaaacacggcgcgttcgctgttttcttagccgattttcaccttagcttctcgtcattactgctgtagcgcgtacgctttaatgataagatttgtgcgcaaattgttttgattccgtaagcccatgaggggcatatcaggtggcaatgacgtgagtggaatactgacgcgctggcgacagttaggcagacgatacttctggccgcatctcttattagggatggtcgcggcgagttttggtttgcccgcgctcagtaacgccgctgaaaccaatacgcctgcaaggacgaccgccagcaccgcgtctaaagttaactttagccattttgcgctgttagaagcctctaaccgtcgtcccaatttcaccgtagattactggcatcagcacgctattcgcacggtgattcgccacctttcttttgcaatggcgccgcaaacgctgcccgttgccgacgcgccgtcgccattacaggcgcatcatatcgccttactgaatacgctcagcgcgatgctcacgcaggagggcacgccgccggcgattgttcgtcgcctctccctggcgtattttgcgccacaaaccgcatttagcatcccggcctggataagtcaggcgcagggtatccgcgccggtccgcaacgtctcagctaacgaaaaaagacccttttactttatttgtagctccgcggcgcggggcatttgagactttattatgctaatcaaattattaaccaaagtattcggtagccgtaacgatcgtacgctgcgtcgtatgcgtaaggccgtcagccttattaatgcgatggaaccggagatggaaaaactctccgatgacgaactgaaagcgaaaaccaacgaatttcgcgcccgtattgaaaaaggcgaaagcgtagagagcctgattccggaagcgttcgcggtggtgcgtgaagccagtaaacgcgtctttgggatgcgtcacttcgacgttcagctattgggtggtatggtgctcaacgatcgttgtatcgccgaaatgcgtactggtgaaggtaagacgctgaccgcaacgctgccagcctacctgaacgcgctgtccggcaaaggcgttcatgtggtaaccgtgaacgactatttggcgcagcgtgacgccgaaaacaaccgtccgctattcgaattcctcggtatgtccgttggtatcaacctgccaggtatgcctgcgccagccaaacgtgaagcttacgctgccgacatcacttacggcactaacaacgaatacggttttgactacctgcgcgacaacatggcgttcagcccggaagagcgcgtgcagcgtaaactgcattatgcgctggtggatgaggtcgactccatcctgatcgatgaagcgcgtacgccgctgatcatttccggcccggcggaagatagctcggaaatgtacaaaaaagtgaacaaaatcattccgcacctgattcgtcaggagaaagaagattctgacactttccagggcgaaggccacttctccgttgatgagaaagcgcgccaggttaacctgaccgaacgcggtctggtgctgattgaagagctactggtgcaagaaggcattatggatgagggcgagtcgctctactcgcctggcaatattatgctgatgcatcacgtcaccgccgcgctgcgcgcgcacgcgctgtttacccgtgacgtggattacattgtgaaagacggcgaagtcatcattgttgatgaacataccggtcgtaccatgcaggggcgtcgctggtctgacggtctgcaccaggcggtagaagcgaaagaaggcgttgaaattcagaatgaaaaccagacgctggcgtctatcaccttccagaactacttccgtctgtatgaaaagctggccggtatgaccggtacggcggatactgaagccttcgaatttagctctatctataagctggacaccgtcgttgttccgaccaaccgtccgatgatccgtaaagatttgccggatctggtctacatgaccgaagcggaaaaaatccaggccattatcgaagatattaaagaacgtaccgcgaacggtcagccagtgctggtcgggacgatttctatcgagaaatctgaagtggtctccagagagctgaccaaagcgggcatcaaacataacgtactgaacgcaaaattccacgccaacgaagcaggcatcgttgcgcaggctggttatccagcggcggtcactatcgctaccaacatggcgggtcgtggtactgatattatgctgggcggtagctggcaggcggaagtcgccgcgctggaagcgccgacggaagaacagattgcgcagattaaagcggactggcaggtacgccatgacgcggttctggctgccggcggtctgcatatcattggcaccgagcgccatgaatcccgccgtatcgacaaccagctgcgtggccgttccggtcgccagggcgatccgggttcttcccgtttctacctgtcgatggaagatgcgctgatgcgtattttcgcctccgatcgtgtctccggtatgatgcgtaaactgggaatgaagccgggcgaagcgattgagcacccgtgggtgacgaaagctatcgctaacgcgcagcgtaaagtagaaagccgtaacttcgatattcgtaagcaactgctggaatatgatgatgtggcgaacgatcagcgccgtgcaatttatacccagcgtaacgaactgctggatgtgtctgacgtgagcgacaccattaacagcattcgcgaagatgtctttaaggcgactatcgacgcctacattccgccgcagtcgctggaagagatgtgggacatcccgggtttgcaggaacgcctgaaaaacgacttcgacctggagatgccgattgccgaatggctggataaagagccggagctgcatgaggagacgctgcgtgagcgcatcctggcgcagtccatcgaggtgtatcagcgtaaagaagaggtggttggcgctgaaatgatgcgtcatttcgaaaaaggcgtgatgctgcaaacgctcgattccctgtggaaagagcatctggcggcgatggattacctgcgtcagggtattcatctgcgtggctatgcgcaaaaagatccgaagcaggaatacaagcgcgaatccttcgctatgttcgccgcgatgctggaatcgctgaaatatgaagtaatcagtaccctgagcaaagtccaggtacgtatgccggaagaggtcgaagcgatggaaatgcagcgtcgcgaagaggcggagcgcctggcgcagatgcagcagctaagccatcaggatgacgatgccgccgtggctgccgatctggccgcccaaaccggcgaacgtaagattggacgtaacgatccttgcccttgcggttctggtaagaaatacaaacagtgtcacggtcgcctgagctaatgcgataaacttaccggcctgataagacataatgtgttgccatcaggtcagtactggcattattgccgaagggcgctacgcttattcggcctggcattgaacacagataaaaaggcgcaggcgactgcgccttttttatggatgcaacaagatgaaaaaactgcaaatcgcggttgggattatccgcaacccgaacgacgaaatttttattacccaacgcgccgctgatgcgcatatggcgaacaagctggaatttcccggcggaaaaattgaagccggcgaaacaccagagcaggcgttgatccgggagctacaggaagaggtggggattacgccaacacaggtgacactattcgacactctggaatatcaattcccggatagacacattacgctgtggttttggctggttgaacgctgggagggcgaaccgtgggggaaagaaggacagccgggacggtggatcgcgcagaacgcgttgagtacggacgattttccgccggccaatgaaccgattattcgtaaattacgccaatttgcgctttagtgggggatcgcaacacgatccccatcgatcttattagcgatttaatgtcgacataatttccggccagtagcgggggccggccgcggcgtcgtgaggaaaaaccgcctcaattgccgtcagctcctgcgggcttagggtcagtgataacgcgccgaggttttcatccaccctggcgcagtggcggctacgtttctgttatagcctaatctcgccggtttatttgtattatcccggccgcgcgcatatggcaccaaaactacgcgtatttattgattatttttgtcataaggcgatattgccgtctcaacagagccatcaccgttagcgctcttcgctccagtcgtcgctatcagactgatcgccgctgctggcgattcgtttctcttcggcggcccattcgcccaaatcaattaactgacagcgtttagaacaaaatgggcggaaggggctaatttccccccagacgaccggtttaccgcaggtcggacagtttacgacggtcacgtcagacatttttactccttagcaacaggccagttcaaaatcaagacgctccggcaccagaccattttcactatccagcggcataaagcgaatggcaaaacggctcttatggccggaaatttgcggataaagttgtgaatcgagcgtcagcataagacgcagcaaatcggcgtcgtccccgttatcctgataaaaaccgttcaggctggtttgcttacggaaaggcgctgaattacggatcagatcaagcaccagcgtcagcgcctgggtgaggggattcaggctggcaagccagctttcaatctgggcatcgcgctgcgcctgttgtaggtgcaaccagatatgcagagtgggtaaatcgaaactgcaacagccgccaggaatacttaagcgttgacgcacaagagcaatcaagcgatcttcgcgtagctgctggccaatcctcggggcggagatcagcacgctgcccgccgattttaactgctggcgcagggcttcaatacggtcttgatcgacgccgggaacctcaacccaggcctgtaatttacgctgctggcgctccagttctttcagcagttcggtacggacttcgccccgttcgaacacatccagtagatcgctgatattacggaaaaaatgcagtgcgccagcatggtctgcaattggcaggttgatggagagctgttggatcaaaaactctatgcgcagccacgtacgcatcttctcattgagagggtgttcaaataggacctgggtgtgcattacggtttttcctgtgagacaaactgcgacgcgagcttaagataactggcgtgcaggcgggccacatctgatgcgatagcatccggtgcgccgttattatcaataacatcgtccgccacggcaaggcgcgcttcacgcgtcgcctgcgcagcgagaatgtgttcaacatgctcgcgcgtaacatcatcacgctgcattgtgcgtatgagctgcgtttcgggcgtcacgtcaaccaccagtacgcggttggctttttgatacagcctgttttcaaccagcagaggcacaacccataacacatagggcgacgtagcctgctgaaactgtcgttgggtttcctgctgaattaagggatgaagcagagcgttaagccaggctttttcttccggatgcgaaaaaatacgctcacgcagcgcccggcgacgtaacgtgccgtcggcggcgataagttcagaaccaaaatgttccgctattgcgttcagggcgggctgccctggctcaaccatctggcgcgcgataatatccgcgtcgatgacggttattccgaggtcagcgaaggcatcagcgacggtacttttaccgctgccaataccgccggttaaggctacggtatacctcatatctccagcttccggaattttagtttgataatcaaaaggttaaattttaaacatacaaagacgatacgctctgagcattaacctactattcgccaggtaaatttatgggattgtaacgtaaaaaaagagaatttcgcagtcttgtacggccatgattagtgcgtatgatagcgtcactggagttgtgagtttcgatttttcgccattaaccccaggaatccgtacatgcgtattgaagaagatctgaagttaggtttcaaagacgttcttatccgtcctaagcgttctaccctcaaaagccgttccgatgtcgaactggaacgtcaattcacctttaaacactcaggtcagacctggtctggcgtaccgattatcgcggccaatatggataccgtcgggacgtttgaaatggcgcaagcattggccgggtttgatattctgactgctgtacataaacattataccgttgaagaatgggcagcttttatcaacacggcctcggctgatgttctgaagcatgtgatggtttccaccgggacctctgatgctgatttcgaaaaaaccgtgcagattctggcgctgaatcctgcgctgaactttgtctgtattgatgtggccaatggctattcagaacattttgtgcagttcgtcgcaaaagcgcgtgaagcatggccgacaaaaacaatctgcgcaggcaatgtggtaacgggcgagatgtgcgaagagcttatcctctccggcgccgatatcgtgaaagtgggaattggtcccggctccgtatgcacgacgcgtgtaaaaaccggcgttggttatccgcaactgtcggcggttatcgaatgtgctgacgcggcgcatggcctgggcggtatgatcgtcagcgatggcggctgcaccatgccaggcgacgtagcaaaagcctttggcggcggcgcggatttcgttatgttgggcggcatgctggcggggcacgaagagagcggcggcagcgtggtagaagagaacggcgagaaatttatgctgttctacggcatgagttcggaatctgcgatgaaccgtcatgtcggcggcgttgcgaaataccgcgcggcagaaggtaaaacggttaaattgccgctgcgtgggccggtgggcaatactgcccgcgatatcctgggcggtctacgctcagcctgcacttatgtcggcgcgtctcgcctgaaagagttgaccaaacgcaccacctttattcgggtgcaggaacaagaaaaccgcattttcaatagcctctaatattctggctggcgtaaatgtgcgccagccttatcccatcccgctcatcgcgtctcccagatgaaaaatcggcaaatacatcgccactaccagcgtaccgataattaagccggtgatgatcaataacgccggttccaacagcgacgccagattatcggccagcgccagcgtagtttcactgtggtgacgggcaaggttatgcagcatgatatcgagtgaaccggacgcttcgcccgttctgaccagttgcaggcatagcggactaaattcctgggtattttttagcgccaaccagaccggattgcccgcggcgatctcctgatgtacctgcgttaaacgctgtgaccagtaagggcagccgagactatcgatagcgctttccagtccctgaagaaaaggaatacctgcgctttgggttaatgccagtacggtgaatatttgcgctagtttctggcctcttatcaggcgacccataacgggaagccgtagcagaagacgctgccgctgcgcttgccaggacggcttttgttttaccctgcggtgagcgatagcaacgagcatcgtcaggaacaagatgagccaaccccatgccgacccccattgcgctatcgcaataataccgcgtgtcagaagaggaagcggggtattgaagctacggtaaatggcggcaaattccggcaggacaaagtgcagcatggcgaaaacgaccagggcggccattgttagaataatggcgggatagcgcagcgcctttttcacgctaaccgtaatctgccgttgcgctttttgctgacgggccagttcaaagcagcattcggccagtttgccggtcagttctccggtgcggatcatcgtctggtagagcggcggaaatacctgcggccaggagactaatgcgctggaaaaagggacgccctgttcaagctcgtgagccagcgtgcgcaacagcgcttgccattgtcggtggggatgctgtttcgcaaggagttccagcccttctgaaagcgtcagcccggcatgaatgagcgtggccaactgatgaataatttcagcgctttgctcttctttccacagtgcggcgttaacgcccatgcgcttgatgcgaagcggcataatgcgctgatgttgcagggtgatgatcagcgccagacgattgtccgcccatacaacgtcttgttccagttgacctttatcgttaacgccttgccagcgccagagctgtttaacgctcatggggcattcccagaacgcacagtatctcttcaaaggacgtcatgccttgctcaacggcgcgacagccattttcaaaaagcgtccctgtaccggtctgttggaggtgggcttccagtgcttgcgccgatgcgccgctcgcaattaactgacgtaatgccggggtaacggttaacacttcgaataacgcggttcggccataaaagccgtggtagcaatgctgacagccgcttgcctgccagcgcggtatcgcgctgggccaaagattgggcgatagcaccacgggatcgctcagacgctgtttgcagtgcgggcaaagcttccttaccaggcgttgcgctaccaccagcgtaagcgccgatgagatcatccagcgtgctacgcccatttgctgcaaacgtatcagggtttcgctggtggagttcgtatggagcgttgaaagtaccagatggcccgtttgtgccgccttaatggcgatttctgcggtgtcgccgtcacgaatttcacctaccatgatgatgtcagggtcctggcgtaaaagcgcgcgcagcacattttgaaaggtgagcccggcgcggggatggatctgcgtctggttaatcccatccagtggaatttctatcggatcctcaacgctacagaggttgatacccggcgtattccgggtttgtagcgcgctgtatagcgtgaccgtttttccgctaccggtggggccagtcaccagtaccagcccctgaggttgctgtagggcttgtctaaaagcggtaagttgtgccccgtacatgcccagcgtgtccagatccagcgtttgttcaacctgatgcaacaaccgtaagacgactttttcgccttctttacagggaagcgtggcgatacgaaaagagatgctgtcgcccgccaggtcaacggtaaattgcccgtcctgcggcagtcgatgttcagcgatgtccaaatttcccaggactttcaatctggccgtcagcgcaagccccgtctctttggcgatgtcctgcagaatatgaagaacgccgtcgatgcggagtcttattcggtagcggctggcgccgggttcgagatggatatcagaggcgcgtttcgccatcgccgagcgtaatgtctgattgagaagctgggctgcggtttctccgcctttcgcggcgtttgccgagggtgcctgatccggcttatgccgatgattttccatttgctggcgagtccagcacacaatatcaatctgtttttgcgtggcgaaatgcagagcgtccagtaacgcatgagagggcgcgtcgaccaccgcaacagtgatactgttgctggcgctattgatcagtacagcctgatgacgttgacacaaggtgttgagctgagcgtctttcatcttgtctccttagttggcgtcaaaacggaagacatcttcacaagcctgttgtaacgcgctgtcgctttgaatattgcagttacgcgtccagccagtaatgccgttagcattgtcccaggcgggcgtcatgatgacgctaagcccgctcagactctcctggccggtaagcgtgatgacgcctttttccacgctcatgcccgaaacataacgggtgatgacgggcgaggggataccgttgacgcccgcatcgcatgtgctcgtcccaccatgttccagagcgcagagttcgacggcagtacggtaggggacaaacgtttgcaacatatccgtcagcgccgctttacgcagatagttctggtaagccggaatgccaatggcgcttaaaatggcgatgatgccaataacgaccatcagttcgataagcgtgaaaccgcgttgtttttccattgttcgctccttgagttagctggcgctactgtggcaaacgcgggaagagcgggcgagcggcaaaaggtaaaacgggaaggcggattctgaagattttcgctgcgttacatgacacggcaacgttattgcgaggcgctacgaatattttaccgaataatgacgcggatctacggacaggtgatttatagacccgacggcgcagcgccatcgggtggagaggatcagcaaaaacgcatggagagatcgagcgcgcgcacgtgcttggtcagcgcgccaacggagatgaaatccaccccggtttcagcaaattcgcgtaaggtttccgcggtgacgttgccggatacttccagccgcgcctggccgttgacgcgtttcaccgcctcgcgcatctggtcggtgttgaaattatccagcatgataatatccgcgcctgctttcagcgcatcgtccagttcatccagattttcgacctcgacttctaccggcacgtccggatgtagccagaacgctttttccaccgcctgacgaaccgaaccggaggcgataatatggttttctttaatcaggaacgcgtcagtgaggcccagacgatgattggcgccgccgccgcataaaaccgcatatttgagcgcggtgcgcagacccggcagcgttttacgcgtgtcgagcaactgggtttgggtgccagccaacagtccaacgtagcggcgtacttcactggcgacgccggaaagggtctggacaaagtttagcgccgtgcgctcgccggtcagcaatacgcgagccgggccgttcagttcaaacactgtttggttggcgtgaatggcgtcgccgtcatcgacatgccaggtgaggcgcacatcatcgcccgccagttggatgaagacctcttcaacccagcgcttgccgcagaaaacgccgtcttcacgagtgatcaccgtggcatgggcttgcgtatctgccggcaaaagttgcgcggtgatatcgttgccagcatcgacttctccacctaaatcttcacgcagcgcctgagcaacggcggcagggatatcgagattaatgcgttccagtagcgcgtcacgtcggtcgtctgggttataacggcgaggcggcatgataaaactccaaattgctaacgaatcataaggtagaaacatgctactctgaagcagctataagcaccactcaaaaggagactccgcatgttgccagataagggttggttggtagaggcgcgacgcgtcccttctccgcattatgattgccgtccggatgacgaaaaaccgtccttgctggtggtgcataatattagcctgccccccggcgagtttggcggtccgtggatcgatgcattattcaccggaacgatagatccagacgcccatcctttttttgcagaaatcgctcatcttcgtgtttcggcccattgtctgattcgtcgcgacggtgaaatcgtccagtatgtgccttttgataagcgtgcgtggcatgcgggcgtgtcaaactatcaggggcgggaacgttgtaatgatttctccattggtattgagctggaggggacggatacgctggcttataccgatgcgcagtatcagcagctagccgccgtgacgcgcacgcttatcgctagctatccggcgatcgccgacaatatgaccggacactgcaacattacgcctgaccgcaaaacggaccctggccctgcctttgactggccgcgctttcgcgctttggtagccctctcgtcgcacaaggagatgacatgacgctgtttacgacattactggtgctgattgtcgagcgcctgtttaagctgggcgagcactggcagctcgatcatcggctggaggcgctattccgtcggattacgcatttttcgatgttgcgcacgatgggaatgacggcgatcgcgatggtggtgacttttctactgctccaggcgttaaaagggctgctatttaacgtgccgacgctggtggtgtggattctcctgggcgtgctgtgtatcggcgcgggcaaagtgcgagtacattatcacgcctggctgaaagcggcgtcccgtaacgatccgcatccttgcgaggcgatggccagcgagcttacgctgattcacggcgtgccgccggattgtaatgagcgtgaatttttgcgtgagctgcaaaatgcgttgttatggataaatttccgtttttacctcgcaccgctattttggtttatcgttggcggtccgtgggggccggtaacgctggtgggctatgcgtttttacgggcctggcagacctggctggcgcgctatcagacgccgcaccaacgtttgcaatccggcattgacgctattcttcatgtgctggactggattccggtacgtctggcgggcgtagtgtatgcattactggggcatggcgagaaagcgttgccggcctggtttgcctcgctggcggatctgcatacttcgcaatatcaggtgctcacacgtctggcgcagttctcactggcgcgcgaaccgcatactgacaaagtagaaacccccaaagcggcggtgtcgatggcgaagaaggcctcgtttgtggtggtggtgattattgcgttgctcaccatttatggggcattagtgtagcgttgtgccgatggcgctaacgcttatgctgcctacaatggaaaaatctgtaggcccggtaagcgttagcgccaccgggcagtgcaacggcttagatcgtatcggctggcggcacgccaaaatcaggcatcccgttttcgtcccagcgcacccgtttcagacgcgtatggcggttgggatcgtacaacggatcgccttcaatttcggtgtaatttctcgcgtggtacaccagtacattttcaccttccggcgtttgcgtaaagctgttgtgtcccggtccatactggcgattctcatagctggtggtaaagaccgggcgcggtgatttatgccagttggccggatcgcgcggatcgtcgtttacgttaatccacagtaatcccatacagtagttttcatcggtggcgctggccgaatagctgataaacagcttgtcgccatgcaccacgacggccggaccttcgttaacccaaaaaccccgacactcccagtcgtactctggcttactgagtcttaccggctcgcctttaatcgtccacggattttccagttcagccagataaatatttgagttaccggcaatatccggcgctttttgcgcccacagataccactgctttccctgatgataaaaagtggtggcatcgagggcgaaggtatcaaacggtgttttaatttgacctttctccgtccacttgccggtgagtgggtcggcatcggcgcactccagggcaaacatgcgatgctggaacattcccagcttatcaagcgcttgagtatgggtagcggcaaaatagatgtaccacttgccgttgatgcggtgcatttccggtgcccagatgagctggctcatcgggccgctttccggtttacgccagacgacaacggggtcggcggcgcgcaacccttccagcgaattagcccggcggatttccagcctgtcatattccggtacggaggcaataaagtagtaatcgctgccgtcgcgtaaaataaacggatcggcacgttgttcaataaacgggtttggccagtttgccatcaggctttccttacgctttcagcggcgttgagctcctgcaactcactcaattcgcggtaattagtgcgacgtttttccaaatcgtcctggatttttttcatcagttcacggtcaactttcagcagacgtaccacgcctgcggtaatcagatagccaacgccggggataacggtaaacaacagcataataccgttcatcgccgaggcgctttgcgctttggcgctggcgtcataaccgtaccaggagagcaaaaagccgaccatcgccccggcaatcgccaggcccagtttcaggaagaacaggttaccggagaagctgataccggtaatgcgtttgccggttttccattcgccgtaatcatcgacgtccgccatcagcgaccagtgcagcggggaagggatctgatgcagaatattgagcaggaagtagagcgccactatcatcacggtggctttcggatcaaagaaatagaacgcgcaggagaaaatcgccagcgcaatattggtccagaaaaataccttcaatttacaccagcgatcggttaagacttttgccagcatactgccgatcatcataccgaccacgccaagactaataaaaagcgtagcgaaatgggtgctttgtcccatcacccaggtgacgtaatacatggtcgccgccatacggataaaccccgggcagacgttacataaggtcaatagcagaatgcgtacccattgatcgtttttccacacatctttgaaatcattcttcatatcatcgtgcgtcggaacggcagggcggacgcgttcgcggacgctggcaaagcagaacagaaacatacccatgccgataatcgccagcacggtcatcgccaactgatagcctttggctttgtcgccgccgccaaaccagtccaccatcggcaatagcgttaacgatagcaacagcgtcgcgatgccgactaatacgaagcgataagcctgacaggccacgcgctcttttggatcgttagtgatcacgccgcccagtgagcaatagggaatattgatggcggtgtaggtcacggaaagcagaaaataggtgacgaaagcatagacaactttgctgttatagccccagtccggcgtcgtgaacatcagaacgctgaacagcgcgtagggaaatgcaatccacagtagccaggggcggaaacgaccatatttactttgggtacgatcggcaagcgcgcccatcaccggatcggtaacggcatcgataacgcgtactgaaaggagtaaaacaccgactaacgccggggcaagaccaaaaatatccgtataaaagtaattaacaaacagcatgatagcgccaaaaataatgttacatccggcgtcacccatgccatacccgattttctctcttaccgaaagtctgcccttatccattgagacttctccccatcagatgatggcggtaattattcgcctgcgagcttttttttgcgtagcaggatcacgccgctgatatggataaaatggttatacgtgggaaactgtgaggcagataacaccctccccggacggggagggcggaaaagtaacgccacgatcagtgggctttcaccgtttttgccgttttttctttacacaggtagccgacgcccaggatgagcagccataccggaatcagccacacggagatcgccatacctggcgtcatcagcataatgatcaataccgccgccataaacagcaggcagagaacattgccgaacggataaaacagggccgggaagcgggttttcacgccctgctgctgtttcgcgcgacggaacatcatatgggcaaggctaatcatcgcccagttaatgaccagcgcggagaccaccagcgccatcagcagtccgaatgcggactctggggccaggtagttgagcagcacgcacaacgcagtcacgacggcggaaaccaaaatggagctcaccggcacgccgcgtttgtcgacgttcagcagcgctttcggcgcatttccctgctgggccagaccgaacagcatacggctgttgcagtaaacgcagctgttataaaccgatagcgcggcggtgagaaccacgatattcagcgcattggcgacaaacgtatcgcccagctcatggaagataaggacaaatgggctggtatcggcggtgacgcgagtccatggcagcagcgaaagcagaaccgccagcgagccgatataaaaaatcaggatgcgatagataacctgattagtggctttggggatgctctgttccgggttatcggcttcagcggcggtgatccctaccagctccagtccgccgaacgaaaacataataatggccatcatcatcaccagcccggtccagccatgcggcagaaagccgccctgttcccacaggttgcgcacggtggcctgcggaccagcggtatcgctgaagagtaaccacgcgccgaacagaatcatagcgatgacggcgatcactttaataatggcgaaccaaaactccatctcaccgaacactttaacgttggtcaggttgatggcgttgataatcacaaagaaggctgccgcagaagcccaggtggggatctccggataccagaactggatatatttacccactgcggtcagttccgccatggcaactaatacgtacagcacccagtagttccagccggaagcgaatccggcaaagccgccccagtatttataggcgaagtggctaaaagagccggcgaccggttcttcaaccaccatctcccccagctggcgcataatcagaaaggcaataaagcctgcaatcgcatagcccaggataattcctggccccgccgactgaataacggaggcgcttcccaggaacaagcctgtccctatcgcgccgcccaatgcgataagctgaatatggcggtttttcaggccgcgcttgagctgctcgccgtgctgctgactgtccatcataaaacctcgtgtatcgggcgcggtttattcataacgcgcttattttgaacgatgcagtagtgcgtgtgtaagtttgcaattccgctttttgtattgatttatttacaagctcgttttttaaaatgtcacttcaactctttcgtcttgatcagaataatggtatgtggccgcgaatgcacctgctttgtgcaggggtgatgacgagttgcgtaaaaagaaagcacttgtaaatacctccttttattttcccttacagatgttaatttgtttttattcattatttatgcataaaaatgcatttaatctactgttgaatcggttcagatgagattttttatcgtttcaaatacgttaaatctacctcctggtgggtaaatttaacatttgtgcacagttacagttttgaaacatgatttctgtaaaattgttaaaatgtgcctcctttactgatttcaatcaaaacctgtatggacagaaggtgaatactttgttactttagcgtcacagacatgaaattggtaagaccaattgactccgggcaaatggcttaagacaggaaatcatggcctacagcaaaatccgccaaccaaaactctccgatgtgatcgagcagcagctggagtttttaatccttgagggaacattgcgtcccggagaaaaactcccaccggaacgtgaactggcaaaacagttcgacgtctcccgtccctccttgcgcgaggcgattcaacgtctcgaagcgaagggattgttgcttcgtcgtcagggcggcggaaccttcgtgcagagcagcctgtggcagagctttagcgacccgctggtggaactgctctccgatcaccctgaatcccagtttgacctgctcgaaacgcgccatgcgctggaaggcattgcggcttattacgcggcgctgcgcagcaccgacgaagataaagaccgtattcgcgagctgcaccatgctattgagctggcgcaagagtccggcgatctggatgccgagtccgaagccgtgctccagtatcaaatcgccgtcaccgaagcggcgcacaacgtggtattgcttcatctgctaaggtgtatggagccgatgctggcgcaaaacgtgcggcagaacttcgaattgctgtatgcgcgtcgggagatgctgccgctggtgagtacgcatcgcacccgtatatttgaagccattatggccggaaaaccagaagaagcgcgtgaagcgtcacaccgacatctggcgtttatcgaagagattatgctggacagaagccgtgaggagagccgtcgtgaacgcgctttacgccgcctggaacagcgcaagaattagttttttctggcagaacgttaaccagaagatgttgtgaataacgcgcaaaaatgtgcgcggcaactaaacgcagaacctgtcttattaagctttctcacgaaagtttaatgggacaggttccagataactcaacgtattagatagataaggaatacccccatgtcagaacgtttccaaaatgacgtggatccgatcgaaactcgcgactggctacaggcgatcgaatcggtcatccgtgaagaaggtgttgagcgcgctcagtatctgattgaccaactgctttctgaagctcgtaaaggcggcgtgaaagtcgcggcaggcgcaggggccagtaattacatcaacactattgccgttgaagacgaaccggaatacccgggtaatctggagctggaacgtcgcattcgttctgcgatccgctggaacgccatcatgaccgtgctgcgcgcgtctaaaaaagaccttgagttgggcggccacatggcgtccttccagtcttccgccacgatctatgatgtctgttttaaccatttcttccgtgcgcgcaacgaacaggatggcggcgacctggtgtacttccagggccacatctctccgggcatctacgctcgcgcgttcctggaaggtcgtctgacccaggaacagatggataacttccgtcaggaagttcacggcaatggcctctcttcctatccgcacccgaaactgatgccggaattctggcagttcccgaccgtctctatgggtctgggcccaatcggtgctatctaccaggcgaaattcctgaaatatctggaacaccgcggcctgaaagatacctctaaacaaaccgtttacgccttcctcggcgacggcgagatggatgagccggaatccaaaggcgcgatcaccatcgccacccgtgaaaaactggacaacctggtctttgttatcaactgtaacctgcagcgtcttgacggcccggtcaccggtaacggcaagattgttaacgaactggaaggcatctttgcaggtgctggctggaacgttatcaaagtcatgtggggcggtcgttgggatgaactgctgcgtaaagacaccagcggtaagcttatccagctgatgaacgaaaccgttgacggcgactaccagaccttcaaatccaaagacggcgcttacgtgcgtgagcacttcttcggtaaatacccggaaaccgcagccctggtggccgactggaccgatgagcagatttgggcgctgaaccgcggtggtcacgatccgaagaaagtctatgctgcactgaaaaaagcgcaggaaaccaaaggcaaagcgaccgtaatcctggcccataccattaaaggttacggcatgggcgacaccgcggaaggcaaaaacatcgctcaccaggtgaagaaaatgaacatggacggcgtgcgttacgtccgcgatcgtttcaacgtgccggttgccgatgctgatctcgaaaaactgccatacattaccttcccggaaggttctgaagaacacaaatacctgcatgaacgccgtcaggcgctgcatggctacctgccaagccgtcagccgaacttcaccgagaagttagagctgcctcaactttcagatttcggcgcgctgctggaagagcaaagtaaagagatttccactacgatcgctttcgtgcgtgccctgaacgtgatgctgaagaacaagtcgatcaaagatcgtctggttccgatcatcgccgacgaagcgcgtactttcggtatggaaggtctgttccgtcagattggtatctacagcccgaacggccagcagtacaccccgcaggaccgtgagcaggttgcttactacaaagaagacgagaaaggccagattctgcaggaaggtatcaacgagctgggcgcaggcgcatcctggctggctgcggcgacctcttacagcaccaacgatctgccgatgatcccgttctacatctactactctatgttcgggttccagcgtatcggcgacctgtgctggcaggctggcgaccagcaggctcgcggcttcctgatcggcgggacttccggtcgtactacgctgaacggcgaaggtctgcagcacgaagatggtcacagccacattcagtcgctgactatcccgaactgtatctcttacgacccggcttacgcttacgaagtggctgtcatcatgcatgatggtctggagcgtatgtacggtgagaaacaagagaacgtttactactacatcaccacgctgaacgaaaactaccacatgccggccatgccagcaggtgccgaggaaggtatccgtaaaggtatctacaaactcgaaaccctcgaaggtagcaaaggtaaagttcagctgctgggctccggttctatcctgcgtcacgtgcgtgaagcagcacagatcctggcgaaagattacggcgtaggttctgacgtatatagcgtgacctccttcaccgaactggcgcgtgatggtcaggattgtgaacgctggaacatgctgcacccgctggaaaccccgcgcgttccgtacatcgctcaggtgatgaacgacgctccggctgtagcatctactgactatatgaaactgttcgccgagcaggttcgtacttacgtaccggctgacgactatcgcgtactgggtacggatggcttcggccgttccgacagccgtgagaacctgcgtcaccacttcgaagttgatgcttcttatgtggttgttgcagcgctgggcgaactggctaaacgtggcgaaatcgacaagaaagtggtagcggatgcgattaccaaattcaacatcgatgcagataaagttaacccgcgtctggcgtaagaggtaaaagaataatggctatcgaaatcaaagtaccggacatcgggacagatgaagttgaaatcaccgagattctggtcaaagtgggcgacaaagtggaagctgaacagtcgctgatcaccgtagaaggcgacaaagcctctatggaagtcccgtctccgcaggctggcgtcgtgaaagagatcaaagtctctgtcggcgacaaaaccgagaccggtgcacttatcatgattttcgattccgccgaaggtgcagccgacgctgcacctgctaaggcagaagagaagaaagaagcggcgccggcagcagcacctgctgcggcagcggcgaaagacgttcacgttccggatatcggcagtgacgaagttgaagtgactgaagtgatggtgaaagtgggcgacaccgtagaagctgaacagtcgctgatcaccgtcgaaggcgacaaggcctctatggaagttcctgctccgtttgcaggcaccgtgaaagagatcaaagtgaacaccggtgataaagtctctaccggctctctgattatggtcttcgaagtggcgggtgaagcaggcgcagcagcaccagcgaaagcggaagccgctccggctgcggctgctccagcagcagcgacgggcgtgaaagacgttaacgtaccggacatcggcggcgacgaagttgaagtcaccgaagtgatggtcaaagtcggcgataaagttaccgctgaacagtcgctgatcaccgtagaaggcgacaaagcctctatggaagttccggctccgttcgcgggtaccgtgaaagaaatcaagatcagcaccggcgataaagtgaaaaccggttctctgattatggtcttcgaagtagaaggcgcagcgcctgcggccgctccggctaaacaggaagcggcggcgccggctccggcggcgaaagctgagaagcctgctgccccggctgcaaaagcggaaggcaaatctgagttcgctgaaaacgacgcgtacgttcacgctactccgctgattcgccgtctggcgcgcgagtttggcgtcaacctggcgaaagtgaaaggcaccggtcgtaaaggccgtattctgcgcgaagacgttcaggcttacgtgaaagacgctatcaaacgcgcggaagctgcgccggctgctgcgggcggcggtatcccgggtatgctgccgtggccgaaagtggacttcagcaagtttggtgaagttgaagaagtggaactgggccgtatccagaaaatctctggcgcgaacctgagccgtaactgggtgatgatcccgcacgttacgcacttcgacaaaaccgatatcaccgatctggaagcgttccgtaaacagcagaacgccgaagctgagaagcgcaaactggatgtgaaatacacgccagtggtcttcatcatgaaagcggttgccgctgctctggaacagatgccgcgcttcaacagctctctgtccgaagacggtcagcgtctgaccctgaagaaatacatcaacatcggcgtggcggttgataccccgaatggcctggtggttccggtctttaaagacgtgaataagaagagcgtgaccgagctgtctcgtgaactgaccaccatctccaaaaaagcgcgtgatggtaagctgaccgctggcgaaatgcagggtggttgcttcactatctccagcatcggcggcctgggaactacccacttcgcgccgattgttaacgcgccggaagtggctatcctcggcgtttctaagtcggcgatggaaccggtgtggaatgggaaagagtttgtgccgcgtctgatgatgcctatctctctttccttcgaccaccgtgtgatcgatggtgctgatggtgcgcgtttcattaccattatcaacaatatgttgtctgacattcgccgtctggtgatgtaagcgaaaagccggcccgacggccggctttttttgataatctcatggagtttgtgaggttattagcgaaagcgataattcgtgatccgtttgttgtttcaaaattgttaacaattttgtaagatacgggcggatagaacgacccggtggatgatgggcgatcaagtaccccggaccgccggatacaaataaagaggtcatgatgagtactgaaatcaaaactcaggtcgtggtacttggggcgggcccggcaggctattctgccgctttccgttgcgctgatttaggtctggaaaccgtaattgtagaacgctacaacacccttggcggtgtttgtctgaacgtcggctgtatcccttctaaagcgctgctgcacgtagcaaaagttatcgaagaagccaaagcgctggctgaacacggtatcgtcttcggtgagccgaaaaccgatatcgacaagattcgtacctggaaagagaaagtgatcacgcagctgaccggcggtctggcgggtatggccaaaggccgtaaagtgaaagtggtcaacggtctgggtaaattcaccggggcgaacaccctggaagtggaaggcgaaaacggcaaaaccgtgatcaacttcgacaacgcgatcatcgcggcaggttctcgtccgatccaattaccgtttattccgcatgaagacccgcgcgtatgggattctaccgacgctctggaactgaaagaagtgccgaagcgtatgctggtcatgggcggcggtatcatcggtctggaaatgggtaccgtataccacgcgctgggttcagagattgacgtggttgaaatgttcgaccaggttatcccggcggctgataaagacatcgttaaagtcttcaccaagcgcatcagcaagaaattcaacctgatgctggaaaccaaagtgactgccgttgaagcgaaagaagacggtatctacgtttcgatggaaggcaaaaaagccccggctgaagcgcagcgttatgatgcggttctggtggcgattggtcgtgtgccgaacggtaaaaacctcgacgcgggcaaagctggcgtggaagttgacgaccgtggctttatccgcgtggacaaacagctgcgcaccaacgtgccgcacatcttcgctatcggcgatatcgtcggtcagccgatgctggcgcataaaggcgttcacgaaggccacgttgccgctgaagttatcgccgggaagaaacactacttcgatccgaaagttatcccgtctatcgcgtacaccgagccagaagtggcatgggttggcctgaccgagaaagaagcgaaagaaaaaggcatcagctatgaaaccgccaccttcccgtgggcagcttctggccgtgctatcgcttctgactgtgcagacggtatgaccaaactgattttcgacaaagaatctcaccgcgtgatcggcggggcgattgtcggtaccaacggcggcgagctgctgggtgaaatcggtctggcgatcgaaatgggctgtgacgcggaagacatcgcgctgaccattcatgcgcacccgactctgcacgagtccgtcggtctggctgctgaagtgttcgaaggtagtattaccgacctgccgaacccgaaagcgaagaagaaataatcttctgtaggtggcaatgcgccacccgatacaaaaaagcggctttacagccgctttttttatgcatggcaaatcagatgtgtcaaatgatggcgaaggataacgaaaccgcaaaatttatcgtttccgcagcagtacgtttttcaaagcttatgccgtcggtagtgcctttgtctgtcattttcgaccaactaattgtttcataagaaatacctctccttactttgtcatcatcctgaaattggtaacgctataaaataatagcgagctaattatgaggtttgatatatgaaactttttctgacaacagcagcgctaactgcgaccttgatttccggcatggcatttgccagcgatcccgtcatcccctgggcgactaacagcggcggtacggaaagcacgcatattgcggcaatgggcgaggatttgaatgcgcagcatcagcagatcacccacacgcatgaaggcgtatgggcggctaattccggcagcattcaggctgatgaagctgcgctgaccagcaacaagccgccggtacaaggccatccggaattaatgccgcatcagggctaatgatcatggcctggcgataacgccaggcgcttacgggttattcggcgacctgccactgtgcgtctggcgcaaaacgcgtgatagcctgaactttactctccgtctccttgcctaaatccgcctgataaatacgatcgtcctggttgaccataaaactcatcaccccggtttcgccgtaatgcatcggccaggccagaagcgccgcgccgtgaccgtcgttatcgctgataatacggaaatggtagccgtggtaaccctcgtctggcgctgcgggactaaagtttgggcctaacggactggggacgtcgcctgctttggttggccagtacaggccatctttttggccttcgctactgattatcctgtgcgcccagcgatggttttgtaagtaataatcctgctgcgcatcaacgtaagcatgcatggcctgtaaggtagaaagttcatttcgcccaatagtacgggtgaggatctcattcccggctgccgccatatcaaagcgccagccgccagtctctttcaccatgggcaccgggagctgccagtcttctcgtccgacattcaggtgcgccgtattgtctttttgtacaatgcgatggccttcgcgccagtcacgattgaagcgggccacggcctcgggatcggcaccttccggcggcagaaattgccgccagtcatcgcccagtagcgcggtaagctgcgtttcgttttttccggctaccgccgcggcgaaggcgctggcggccgcttccggggaggggaaccgttcctgcgcgtagcccagcaagggtaacgacagtaacagagcgcttaacataacctttttcattatctgctccggttaacggcgatgaaattcatgatgttcagaaaaatgttcccgcgcggcggcgcgttgctcggtgtttaagtgactgccgcgacggctttccaggccgcgtagctgttgcgattgccatgacggcgatcgactgtcgttcccgctaaacacattggcgtgcatattctggcgaaatgcctgacgctgctgcggcgtagaggattcaatacgctggcgggcggtgtctctctgctgttgtgaaacagggtgctgctgggctttagccttcagctcggaacgatgctgctgcgtggtggatttattcagtgtctgctgcgccgcctcgcgacgactgctgttttgtgttccgtcatagccacggtaattattacgctgggcaatttgatttaactgctgcgatgccgccttacgctgggcatcgcgggtgcctggcgctggcaaagaagcgttggccgtatggctgcgctgttgaaattgcgtcatggccgcctggcgctgactgtcgcgagacactggcgcttgctgcgttgcgcttaacccgccgctaacattggtgggatggaaccgttgcgcaacggtattattcggataggggacgccattgcgccaggcgggattatgctgccagcccatcgtttggcccggcaggttttgcccggatatccggttgaaattattgacattgatgttgatattatcgccattatgttgataaccgttaccaccatgatggtaatcatcatcatggtggtcgtcgtcatggtggtgatgatcgtcatcatcccagtctatgctgctgaacaacgcataggtggtggcgacgcccagactataaccaaaacctttaacaaaactgtcggcaaactgctgccccggagggggcggtaaatacaccggcggataagcggtattgggccaggcgccatacaccgtcgcggggttatagttcggcacgtacaccacctgcggattcgcgggttcaatttttataacggtcgacggtgtcgctggcgtactggcggatgtggtggttgtcgtcgtgacggcggtagaagcgctggacttcggcacgctggtgacggtttgctgtggcgtggattttagcgaaccggtttgttgagcgagcagacgcagcctttgcaccgcatccatcacatcctgtggctgggctaagaacgcatcgcccaggttttgcacccattgcggattctcgcccataagcgccatcaactggggaaaggcgaccagcgatttgacgctggggtcccacggttggctggccaccgcctgaatagcggcatcgccctgcagcgtagggttatcgcgcgaccactggacggcctgaactacgttcgccgggtaggtggaggccatgagcacctgcgaaagcagggcatcgggataaagcgcaacaggcgcgacccattgatcaatttgcgcagtggtaaaggtcgttttcgcgacaggcgcgggcacagcggtctgcgttggctcagaggcgggagctgccgcctgcgcgggcgcttcgggagcgcggcttttaacatacagtacgcccgaagcggcaaataacccggcactgcacacaagggcaatgagatggggtttaaagggcaacgtcattttatctctcccgattccagagaatcgctatggtcattatgcctgccgccgacggggtgcagtttggcgtgagtataaagggacgatagtttaatttttagctaatgttgggatcggtaacgttacgtgacgatcaaagcacgaaatgaggtaagcatttatggctgcagctcccgtctcagtagagcattagaccatccttaacgattcagccacttttttatgttgcttttttgtaaacagattaacacttaaagaaaatcctgttattgtgccttatgcggtaccgggcatttaccctactaactactgtctcacaggagcgtgaagagaatcgcccatcaacaaaagcgccgcattatgacaatgagagcgaggagatatcgtcgtgctagaagaataccgtaagcacgtagctgagcgtgctgcccaggggattgtgccaaaacctttagacgcaacccaaatggctgcgcttgtcgagctgctgaagaccccgcctgtgggcgaagaagaattcctgttagacctgttgatcaaccgcgttcctcctggcgtagatgaagccgcttatgttaaagccggttttctcgctgctgtcgcgaaaggcgacaccacctccccgctggtctccccagaaaaagccattgaactgctgggcaccatgcagggtggttacaacattcatccgctgattgatgcgctggacgatgcgaaactggcgccgattgctgccaaagcactgtcccacaccctgctgatgttcgataacttctacgacgtagaagagaaagccaaagcgggcaatgaatatgccaaacaggtgatgcaatcctgggccgacgccgaatggttcctgagccgtccgccgctggcggaaaaaatcaccgtcaccgttttcaaagtgaccggcgaaacgaataccgacgatctctctccggcgccggatgcgtggtcgagaccggatatcccgttacatgcgcaggcgatgctgaaaaacgcccgtgaaggcattgagccggatcagccaggcgttgtcggcccgatcaaacaaatcgaagcattgcagaaaaaaggctacccgctggcttacgtgggtgacgtggtgggcaccggttcttcccgtaaatccgcgaccaactccgtgctgtggttcatgggcgatgacatcccgaacgtgccgaataagcgcggcggcggtctgtgcctcggcggcaaaattgcgcctatcttctttaacactatggaagatgcgggcgcgctgccgattgaagttgacgtttctaacctgaatatgggcgatgtgattgacgtctacccgtacaaaggcgaagtacgcaatcatgaaaccggcgagctactggcaaccttcgaactgaaaaccgacgtgctgattgacgaagtgcgtgccggtggtcgtattccgctgattatcggccgtggcctgaccaccaaagcgcgtgaagcgctggggctgccgcactcagacgttttccgtcaggcaaaagacgtggcggaaagcagccgtggcttctcgctggcacagaaaatggtcggtcgcgcctgtggtgtgaaaggtatccgtccgggcgcgtactgcgaaccgaaaatgacctccgtcggttctcaggatactaccggcccgatgacccgcgacgagctgaaagacctggcctgtctgggattctccgccgatctggtcatgcagtcgttctgtcacaccgcagcctatccgaagccggttgacgtcaccacgcaccacacgctgccagacttcattatgaaccgtggcggtgtctctctgcgtccgggcgacggcgtgattcactcctggctgaaccgtatgctgctgccggataccgtcggtaccggcggtgactcccatacccgtttcccgattggtatctctttcccggcgggttctggtctggtggcgtttgccgccgcgaccggcgtgatgccgctggatatgccggaatccgtgctggtgcgcttcaaaggcaaaatgcagccgggcatcaccctgcgcgatctggtacacgccatcccgctgtacgccatcaaacagggcctgctgaccgttgagaagaaaggcaagaaaaacatcttctctggccgcatcctggaaatcgaaggtctgccggatctgaaagtcgagcaggcgtttgagctgaccgatgcttccgccgagcgttccgctgccggttgtaccatcaagctgaacaaagagccgattgttgaatacctgacctccaacatcgtcctgctgaagtggatgatcgccgaaggctacggcgaccgccgtacgctggaacgtcgtatccagggcatggaaaaatggctggcggacccgcagctgctggaagccgatgctgacgcagagtacgcggcggtgatcgacatcgatctggcggatatcaaagagccaatcctctgtgcgccgaacgatccggacgacgcgcgtctgctgtctgacgtgcagggcgagaagatcgacgaagtgttcatcggctcctgcatgactaacatcggccacttccgtgcagccggcaagctgctggacaaccataaaggccaactgccgactcgcctgtgggtggcgccgccaacccgtatggacgccgcgcagctgaccgaagaaggttactacagcgtgttcggtaagagcggtgcgcgtattgagatccctggctgttccctgtgtatgggtaaccaggcgcgtgtggctgacggtgcgacggtggtttccacttctacccgtaacttcccgaaccgtttaggtaccggtgcgaacgtcttcctggcttctgcggagctggcggcggttgcggcgctgatcggcaaactgccgacgccggaagagtaccagacctacgtggcacaggtggataagacggcggtggatacttaccgttacctgaactttgaccagctttctcagtacaccgagaaagcagatggcgtgattttccagactgcggtttaatttacattttaagggggctaattgccccctttttattcatattatatgtttctgtattttctatctttttaagatgttgcgtatttttattttagcttcttcatattgtaggttttcctctcttaagtatatatgaacagctttgtgacaatttgggcaaagtaatgcaaagtcagttttcaatattctgtgctcaccggtaaaagtatgtattggtattttgtggtgggcctcaatatagtttttaccatatttatctaagaatttaatctcacaaatatcacaaacccattgcgagttatcttttatttcatctattatttttctattccgctcagataacatatgagttatgtatttaatttttccttcagtgtgctcgtttttatacaaaatgacgtcatcattgtcactattcttatcatttagacttgggaaacttatcattttttctaagatgactgctttttctagtatgtctatgattttaaagcatccctgaaattcccatttgttagatgaatcagtaaataacaaaattggatagttgcttatcggttggttaattagaacccggttcgcagaatcattaaagttaatgatgccttttgctgctttaaatgagtaagagtatatggttttttcattatttttccagccatcatcagcgtaagaaccatcctttgtttttattattactgctttgatattgggatgttctcctatccaatttattccttgttgaggtgtgtttttaattatccaatccttgccttcccaattttcactgtcatcttttttagatttttggatgagctgggataaattttgtttgttaattatatctgagatagttaatgaaagaagttgagatggatattgaataagctttaaggttcccattatattcctatactataaagtgtataataattatcattatacatgctagcagtgtaaatttactacattcataatgatagcatgggacgatgctacttgtggaaccagaatgcagataacccgatcttcttattgataaatttacgacaattagacgtatccactttttttcctctacatagctgcgataattacccataggtacaatgcagcggtgacgcattgcctttgtagaggaacagatcatggattacgaatttctgcgcgacgttaccggaggggtaaaagtacgaatgtcgatgggccacgaggtggtcggtcactggtttaatgaagaggttaaagacaacctctcgctactggatgaagtagaacaagccgcgcgtacggtcaaaggcagcgaacgctcctggcaacgagcagggcatgaatacacgatctggatggacggcgaagaagtgatgattcgcgccaatcaactggatttttccggcgatgagatggaagaggggatgagttattacgatgaagagagtttatccctgtgcggcatggaggattttctgcgggtcgtcgccgcgtatcgggaattcgtcagtaaagcctgaccctctcttcgttattgtcccacaacgccagtcgacggacagttgggggcggtagtggaaacgaagtcgccaaacattccagccgggagtatcccggcttttttatagcagaatgattttttgatttttattaatcattttaaaactgtgatctgacgcgtttgtgatcttaatttgattgaatataatcgttatgattttattcaatcacaacaagcaacaggcggtaagaccatgaacatcaaaaaagcaatagagcgcgtacccggcggcatgatggtcgtaccgctcgttattggcgcagtcattaacaccttcgccccgcaggcgcttgagatcggcggttttaccactgccttatttaaaaacggcgcggcaccgctgattggcgcttttctgctgtgtatgggagccggtatcagtgtgaaagccgcgccccaggcgttattgcagggcgggacgattacgctcactaagttgcttgtcgccatcggcattggtctgggcgtggagcatcttttcggcgcggagggtatttttggcctgagcggcgtggcgattatcgcggcgatgagcaattcaaatggcggactttatgctgcgctggtaggcgaattcggcaatgagcgcgacgtcggcgctatctctattttgtctcttaatgatggccctttctttacgatgattgcgctgggcgcggcagggatggcgaacattcccattatggcgctggtggcggtgctggttccgctggttgtcggcatgatcctcggcaatcttgatcctcatatgcgcgattttttgaccaaaggcggcccgctgctcattcctttctttgcttttgcgctgggggcgggcatcaatctggaaatgttactgcaaggcggacttgccggaattctgctcggcgtgctgacaacgttcgttggcggtttctttaatattcgcgcagatcgtctggttggcggaactggcattgccggggcggcggcctccagcaccgcgggtaatgccgttgcgacgccgctggctattgcgcaggccgacccttcgctcgccgaggtggccgctgctgccgctccgctgattgccgcctcggtgatcaccacggcaatcctgacgccagtgttgacctcctgggttgcgaaaaaacaggcgcgtcaggcttctttggagaaaaacgcatgaaaatgatagttatcgccgatgattttaccggatcgaatgataccggcgtccagttggcgaagaagggggcgagaacggaagtcatgttgagcgcgtcgcaaaaaccgtcccgccgcgccgatgtgttagtcattaacaccgaaagccgggcgatgcccgcagatcaggcggcatctgccgtttatgccgcgctttcgccgtggtgtgagacatcgccagcgccgctggtgtacaaaaaaatcgactccacatttcgcggcaatatcggcgccgaagtgacggcggccatgcgcgccagtcagcgaaaactggccgttatcgccgccgcgatccctgcggccggacgcacgacgcttgaaggaaaatgtctggttaatggcgtcccgctactggaaaccgaatttgccagcgatccgaaaacgcccattgtctcttcccgtattgccgagatagtggcgttgcaaagtgagatccctgtgtatgaagtctttttgcaggatgtccgacgcggcgggttaagcgccttacttacggcttatgcggctgagggcgaagggattatcgtcgtggatgcggtggaagagcgggacctgacgttgattgcgcaagcggcgtgtgaacaaccgtcgatgccgctgctcgtcggcgcagcgggtctggcgaatgcgttgccggttgaactttttatgcaagaccggcagcggctgccggtgctggtggtggccggttcgatgagcgaagccacgcgacgtcaggtggataatgcgctgtgccggggacgtgcggaggtcgtggatatcgatgccgcgcgcatggtgtcggatagcgcggaacaggaaatcgcgtctgtcgtagagcaggcctgcgcgctgttaagtcagcatcgacatacgattttacgcaccagccgtcgcgcagaagatcgacagttaatcgacgcgttgtgcgaaaaatccgcgatgagccgtcagcaattgggcgagcgactgagccagcggcttggcgtcgtcacgttaaacattatcgagcaggcgcggattggcgggctgtttctgaccggcggcgatatcgcaaccgccgtcgccggcgcgcttggcgctgaaggttatcgcattcagagcgaggtggcgccctgtattccctgtggaacgtttgtaaacagcgaaattgacgatctgccggtcattaccaaagcgggcggattcggttcagacagtacgttgtgtgacgcgctttattatattgaggagatgtattgtggagactaaaaccgttgccattaccatgggcgatccagcgggcattgggccggaaattattgttaaagcgctaagcgaagacggtctcaacggcgcgccgctggtggttattggatgcctcgcaacgttgaaacgtttacaggcgaagggcatcacgccgaacgtcgagttacgggccattgaacgggtcgccgaagcgcgttttgcgcccggcatcattcatgtgattgatgagccgctggcgcagccggaggcgctggaggccgggaaagttcaggcgcaggcgggggatttagcgtatcgctgcgtgaagcgcgccaccgagttagcgttacggggcgacgtacaggctatcgctaccgcgccgctgaataaagaggcgctgcacctggcggggcacaactatccgggccataccgagctgctcgcgaccctgacccatagccgcgattacgcgatggtactttacaccgataaactaaaagtgattcacgtttcaacgcatatcgcgctgcgtaaattccttgatacgttaagtaccgcgcgtgtcgaaacggtgattggcattgctgatactttcctcaagcgtgtgggttacgttaaaccgcgtatcgccgtggcaggcgtgaatcctcatgcgggcgagaatggcctgtttggcgatgaagagacgcgtatcctgacgccagccattaccgatgcccgcgcaaaaggtatggacgtttatgggccgtgcccgccggatactgtatttctccaggcttatgaggggcagtatgatatggtggtggcgatgtatcatgaccaggggcatatcccgttgaaattgcttggcttttatgatggcgtgaatatcaccgcggggctgccgtttattcggacctctgctgatcatggcaccgcatttgatatcgcctggacgggaaaagcaaaatctgagagcatggccgtatcgatcaaactggcaatgcaactggcataattccctgttatgaaaggacaacaccgtctggatctcattgtggcgtatctgaaaaaccatacgctggttacggtagaacagctggttgaggcggttgacgcatcgccagccactatccgtcgcgatttgatcaagctggatgagcagggcgtgatcagccgtagtcatggcggtgtggcgctgcgacgttttgaacccgcccagcccaccaccaatgaaaaacaactgcgatcgcccgctgaaaaacgggcgatcgcacgcgttgccgcatcgctggtcaatgctggcgatgccgtcgtgctggatgccggtacgacaatgatggaactggcgaaatgcttaacccatcttccgctgcgggtcatcaccgtcgatctgcatattgcgctgtttttagctgagttccggcaaattgaagtgacgattgtcggcggtcgtatcgatgacagcagtcagtcctgtatcggtgagcatgggcgcaagctgttgcgcagcgtttacccgaacatcgcgtttatgagctgtaattcatggggggtaaaaacgggcgtgacgaccccaacggaagataaggccgggcttaaacaggagattattgctaatgcgcagcgcaaagtgttgctggcggacagcagtaagtatggcgcgcattcgctctttaatgtggtgccgcttgagcgctttaatgacgtgattaccgacgtcaatctgccgccgtcagcgcaggttgaactgaaagggcgcgcttttgcgctaacgctggtgcagccggagtgacagcgccgtcaggcgctgccagtggtgaatcagaccgcagaaatattgcggccgtagtaaatctcgcgcatctctttccacagcgcggcggtgatctcctggcgttcggtttcagtgagatcttccggtttggtgtgaaacatgtagtgcttaagatcgaactctttaagcagcatcttggtatggaaaatattttcctgatacacgtttacatccaccatgtcatacagcgacttcatatcttccgacataaaattctgaatagaattaatctcatgatcgataaagtgcttcataccgttgacgtcgcgtgtaaagccgcgcacgcggtaatcgatggtgacgatatcggactctagctggtggatcaggtaattgagcgcttttagcggtgaaatcaccccgcaggttgacacttcgatgtcggcgcgaaaggtgcatagcccgccttccggatggctttccggataggtatgcacgcagatatggctcttatcgaggtgcgccaccacggtttccggcagcgggccgggatgttcggtttgatcgataagtttcgggtcgatcggctcttcgctcaccagaatcgtgacgctggcaccctggggttcataatcctgacgggcgatgttcaggatgtttgcgccgataatggagcaggtctccgacaggatctcggtcagtcggttggcgttatagagttcatcgatataggcgatatagccatcgcgctcttctgcggttttggcgtagcagatatcgtaaatacaaaaactcaggcttttcgtcagattgttaaagccatgcagtttcagctttttcaatttttatcacctccttaacgtcactgtgcggacagtgcgtcatgtagatattgcggtagcgcaaatgcagcggcatgaatagccgggttgtaatagcgacatttgaggccggcggcatgaaaacgtgcctgaataatttcgctcgacaggtggcgaagagcgtcgttgtccgtcgcccaggcgaaggtcataatgccgccgtaataggtcggaatcgccgcctggtagaagccgacatcgctgaagtaatgactcagcttgcggtggctgtcgagcgcttcatcctgctgcaggaagcacacgccgttctgggcgacaaaaatgccgcccggattcaggcaacgcttacagccttcataaaaggcggaggtaaacaggctttcgccggggcctatcggatcggtacagtcggaaatgatcacatcaaaggtctgatgggtttgattgacgaaattcacgccgtcgtcgattaccagcgtaaagcgcggatcgtcgtagctgccggcattgtggttgggtaaatactggcggcaaaacgagactacgccagcgtctatctctaccatggtgatggtttcgacgtttttatgccgggtaacttcacgtagcattgcgccgtcgccgccgccgataatcagaacgtgtttcgcatgaccgtgcgccagcagcgggacatgggtcatcatttcatgataaataaactcgtcgcgttcggtggtctgtaccacgccgtccagcgccatcacgcggccaaaagcggcgttttcaaagatgattaaatcctggtgatcggttttttcatgatacagaacgttgtctacggcaaagtactgaccaaactggtcgtgtagcgtttcatgccacatcgtattttcggccattggctgatacctccattgttaacacccgtaaaaaaagggcgcaacatcatagctaacaatgaccgtggatgcacggtcattatttcagcaataggatcacggaggattatttaacgtaggctaacaggctcagagaatcgcgggccagagctttgcattttttagcgaccggaataccgatgccgctaagatcgcggtagctgtcttcgcccaacgatttcatatcgaaggtgtcgtagttactcaggtcccactgattttgctgggcaaaaaagaccagcgcacggcgaatctggctgttgggtaaattttggtaaccacagtcatttttcagaaaaacgaaaactgccgttaaatcggccatatcttcagcttcggattcagtaagcgcatagctatttgcgcataaggccatcaggctgccaaacaacacgggtctgaaaaacgtcttcattgcttctaccacggcatcagggaaagtcaacgttagcatactgagaacgtagcgacgacttttattatcaggattggtcgcggcgttttcattcttattgtattgctgtcaggaatggtaaagacgtgttgctggcttgaccttcccgttagggcagggtctaagcttagacacccgcctgttcattataaggaaatgattatgttacgccgtgatttcttaaaatattcagtggcgctgggggttgcatcagcgctgccgctgtggagccgcgccgcttttgccgccgaacgtcccgcgttgcctattcctgacctgttaacggcagatgcgagcaaccgtatgcagttaattgttaaagccggacagtcgacattcgccggtaagaacgcgacaacctggggctacaacggtaatttgctggggccagcggtacagcttcacaaaggaaaaagcgtgaccgttgatatccataaccaactggccgaagacacgacgcttcactggcatggtctggagattccgggcatcgtcgacggcggcccgcaggggattattcccgcaggcggaacccgcacggtgacgtttacgccggagcaacgcgccgcgacctgctggattcatccgcacaaacacggcaaaaccgggcgccaggtggcgatgggccttgccgggctggtgctgattgaagatgacgagattcgcaaattgcgcctgccgaaacagtggggcatcgacgatgtgccggtgatcattcaggacaaacgcttctccgccgatggccagattgattatcaactggatattatgaccgccgccgtcggctggtttggcgatacgctgctgaccaatggcgctatctatccgcagcattccgcgccgaaaggctggctacgtctgcgcttgctaaatggctgtaatgcgcgctcgctgaatatcgccgccagcgataatcgcccgctttatgtgatcgccagcgacggcggcctgctggcggagccggtgaaagtcaccgaactgccgttattaatgggcgagcgttttgaagtgctggtggatatcagcgacgggaaagcctttgatctggtgaccctgccggtcagccagatgggaatggcgatcgctccgtttgataaaccgcatccggtgatgcgtatccagccgctgcggattaccgcctccggtacgctgccggatacgttgacgacgatgccggcgctgccgtcgctggaagggctgacggtgcgcaacctgaaactgtcgatggacccgcgccttgatatgatggggatgcaaatgctgatgaagaaatatggcgctcaggcgatgagcggcatggatcatgacagcatgaacgcgcatatgcagggcggcaatatggggcatggcgagatggatcatggcaacatggatcacagcgggatgaatcatggcgcgatgggcaatatgaatcacggcggaaaattcgacttccataacgctaactttatcaacggccaggtcttcgatatgaacaaaccgatgttcgcggcgcaaaaaggccgacatgaacgttgggtgatttccggcgtgggtgacatgatgctgcatcctttccatattcatggcacccagttccgtattttgtcagagaacggcaaagcgccagcggcgcacagaacgggctggaaggatacggtacgcgttgagggcggtatcagcgaagtgctggtcaagttcgatcacgacgcgccgaaggaacatgcctatatggcgcactgtcatctgttagaacatgaagatacgggaatgatgttaggatttacggtctgaccgatgtctgtgacgcaggccgggtaaggcgaagccgccacccggcacaatgcccggcatacgccgggcattaatggttatttcgcgtcgtcaggcaaagcataggccacgatatagtcgcccatcttcgtaccaaacgaaccgtggcctccggcagaaacgaccacgtactgcttaccgtttacctcataggtcataggcgttgcctggcctccggcgggtaaacgtccctgccacagtttttccccgttgctcatgttataagcgcgcaggtagttgtcggcggtcgcggcaatgaacagcacattaccggcggttgagattggcccgcccagcatgggcatccccatgttgaacggcaccggaaccggcatcgggaacggcatactgtcgcgcggcgtccctatacgtttcttccacacgatttcattggtcttcagatccaacgcggaaatatagccccaggccggttgtttacacggcaggccaaacggcgaaaggaacggattcagcgtgacgccgaatggtacgccgtactgtggctgaatacccgcttctgtaccggtacctttcgcgtctttcggcggctccattggattacccgggccgcgtgggatcagcttcgagacaaacggcagcgccatcgggttagcgatagcgacctgacggtctggatcgacggaaataccgccccattcaaacatccccaggttgccagggaataccaatgtcccctgctcggacggcggggtgaagataccttcatagcgcaactggtggaacatgacgcggcacaccagttggtcgaacatggtcgcgccccacatatccgcgccggagagatcttttttcgggcggaaggttaaatcagagaacggctgagttttggcgacgtaatcgccttttgccgcgccctgcgggaccggtttttccggggcgggcacgaccagctcgccattacgtctgtccagcacaaagatattaccggttttcgctggcgcatagataaccggaacggtagtaccgtcaacggtaatatccgccagcgtcggctgtgccggcaggtccatatcccacagatcgtgatggacggtctgataactccaggccagtttcccggtggtggcattcagcgccaggatggagctggcataacgctcctgctccggcgtgcggttaccgccccagatatccggcgtggtcacgcccatcggcagatagaccagatccagtttcgcatcataggcggcaggcgcccaggagttcggcgagttaaaggtaaaagcgtgctcatcggctggaatcgcgttcggatctttcgcccccggatcgaaggcccacatgagtttaccgctattaacatcaaaacctcggataacgccggacgtttcgcgggtagagaagttatccgtgaccgaaccggcaatgacaattgttttatcggtgataatcggcggcgacgtcggttcatacagtcccggtgtggtatccggcatattggtttgcagattcaggacgcctttgttggcgaaggtttcacacagcttgccggtttcggcattcaccgcgaaaaggcgaccgtcgttgaccgggaggataatacggcgcggacagtcggcgatgacctccggcgaggcggtatccgctttggcctcatgataagagacgccgcggcaggtcacatgctggaaagacgaatcggtcttcaactgaggatcaaaatgccacttctctttaccgctggcggcgtccagcgcgaacagacgctggtgagctgtacacagataaagcgtatcgccgacttttatcggggtcacttcgttggtgatttcacccggatcgttgggctgtttcagatcgccggtgcggaagacccacgcttctttcagttggtgaacgttatccgcagtgatctgtttcagcggcgaatagcgttggccttcctgattgcgcccataggccggccagtcttcgtcggcgatcgacgaacttgttgcggcgggcgtggcgtcggcgcgaagcgtaccgttgatctcctgcgggtcgttgaagccggcccaggtcagaatgccgccgctaatcagcaacgccacgaccagcgccgccactgcgccactggaaggaaccaccagccgatgccagacaaacggtaatattagccagatgccgaaaaacaccaggatatcgctacgcggcgtgagcgcccagaagtcgaacccgacttcccacacgccccaaatcattgtcgccagcagcagggcggcatacagccacagtgcggcacgtttactgcgccatagcaatccggccacaaccagcatcacgaggcccgcgatggggtagtaccaggaaccgccaatagcaaccagccagacacctccgataagaagatacagcccacaaagtgctgcaaagagggccgtcagcgtcacgagtaatcgtggcgatcgtgcgttattttctgccataaaaagacaccatcccaaattgttaattttttagtagcaattaagtataggaattaacatgtgtgatcgtcatcacaaaatgagctttcttatcaaatgccgcgaatgaatacgtttgctgttatactgcgtgccttgcgcgtcaatgcggcgttattagtcaccggcattgagtgatttgtttttaaatcatatggttataaatatgaaacatactgttgaagtcatgatccccgaagcggagatcaaagcacgtattgccgagttgggtcgtcagattaccgaacgttataaagacagcggcagtgaaatggtgctggtaggtctgttgcgtggctcatttatgtttatggcggacctgtgccgtgaagtccaggttcctcatgaagtcgattttatgaccgcctccagttatggtagcggcatgtccaccacccgcgacgtgaaaatcctcaaagatctggatgaagatattcgtggtaaagacgtgctgattgtcgaagacattattgattccggtaatacgctgtcgaaggtccgtgaaatcctgggcctgcgcgagccgaaatcgctggcgatttgtacgctgctggataaaccttctcgccgcgaagtggacgtgccggttgagttcgttggcttttcgattccggacgaatttgtagtcggttacggtatcgactacgctcagcgttatcgccatctaccgtatgttggtaaagtggtgctgctggacgagtaagcgcagaaatgccggatggcgtcgctaaagcgacttatccggcctatagctaatggcttattggtggggaatgtatttcagacttagggcggaaatacccttatgatagccgttctccagcgtttctctgttggtggcggtgacgtcaagatcgcgcagcaggccatcattgatactgtacgcccagccgtgaatggtcacattctgaccgcgtttccacgctgactgcataatggtggaatgccccaggttatagacctgttccatgacgttcaattcatagagcgcgtccagacgttgctcttcgggcatttttcccaacagcgagctatgtttaagccagatgtcgcggatatgcagcagccagttattaatcaagcccagctcagggttttctaccgcagccttgataccgccgcaaccggagtggccgcaaatgataatatgctcaacttccagaacatctaccgcatactgaaccacggagagacagttcagatcggtgtgaataaccaggttagccacattacggtgaacaaacaattcgcccggttcaagcccggttaaacgctctgcgggaacgcggctgtcggaacatccaatccatagaaagcgcggtttttgcgcttgcgccagtttctcaaaaaatccggggtcctcttccaccagcatttttgaccatagtgcattgttgctgatgagtgtatctatgtctttcatggaagttaacgacctgtaaccaaataagtgcgttgggctaatatagggcaactccgtaattatttaaaccatatataaagtgtaagaacgtaaagtaagtgagaatttatgaccattgcgctggaacttcaacaacttaaaaaaacctatcccggcggcgttcaggcgttgcgcggcatagatttgcaggtcgaagcgggggatttttacgcgcttctggggccaaatggagcagggaaatcgaccaccatcggtattatcagctcattggttaataaaacgtccgggcgcgttaacgtttttggttacgacctggaaaaagacgtggttaacgccaagcgacagcttggactggtgccacaggagtttaactttaacccgtttgaaacggtgcaacagatcgtagtgaatcaggcgggttattacggcgtggaacataaagaggcggttttacgtagcgaaaagtatttaaaacagctcgatctgtgggaaaaacgtcatgaacgcgcgcggatgctctccggtgggatgaagcgccgcctgatgatcgcccgcgcgctgatgcatgagcctaaactattgattctcgatgagccgacggcgggcgtcgatatcgaattgcgtcgctcgatgtggggattcctgaaagatttaaacgccaaaggcaccacgattattcttaccacccactatctggaagaggcagaaatgctgtgccgcaatatcggtattattcagcacggcgagctggtggaaaatacctccatgaaaaatctgctttcaaagctgaaatcggagacgtttattctggatttagcgccaaaaagcccgctacctaagcttacgggttatcaatatcgtctggtggatacctcgactctggaggtggaagtgttacgcgagcagggggttaacagtgtctttagccaactgagcgagcagggggttcaggtattaagtatgcgtaataaagccaaccgtctggaagaactgtttgtgtcgctggtgcatgaaaaacaaggagatcgcgcatgatgcagctttactgggttgcccttaaaagcatctgggcgaaagagatccaccgctttatgcggatctgggtgcaaacgctggtgccgcccgtcatcaccatgacgctctattttattattttcggtaacctgattggttcgcgcatcggcgaaatgcatggttttagctatatgcaatttattgtgccgggcctgattatgatggcggtcattactaactcctacgcgaatgtcgcgtcgtcattttttagcgccaagtttcagcgcaatattgaggaactgctggtcgcgccggtaccaacgcacgtgatcatcgccggatttgtcggcggcggcgtagcgcgcgggctgtgcgtagggattctggtgacggcgatttcgctctttttcgtgcctttccaggtgcattcctgggtatttgtcgcgctaacgctgattctgaccgcgattctgttctcgctggccggactgctgaacgccgtgtttgcgaaaacctttgacgatatcagtctgatcccgacctttgtgctgacgccgctgacctacctcggcggggtattttactcgctgacgctgctgccgccgttctggcaagggctgtcgcacctgaacccgatcgtctacatgatcagcggtttccgttatggttttctgggtatccatgatgtgccgctggtgacgacgtttggcgtactggtgatctttatcgctgctttctatctgctgtgttggtcgctgatccagcgcgggcgcgggttgcgcagttaagcgctgactggggagatggggcgttgggttgcgcttcgcttcacttcatctacgggtccgtaatatcaatgggttacgggtcggtaggtgaggcttgtcgaaacccaacgcttctctcagcgaatctgaatctccagcgtggcggtggcctggtattctccggtgtggggaacatgtccggtggtattgaccggcgcggcggtgaactcggtgctgcctctaccgtcagtgtaatcttcaatcggcaattcggcgctgccgccgggaacgatggtattatcgtatttatcggaaatccgtatccccaaattctcattgtcagttttcaggtagtccgggttgtgcggatcggttgcgccatttaatgacattgacaggttggtgccgtccgccacgttgctacaggtaaagtttacctgagtggtgacgtgcgagttctgcgggctgtcgccgaggtgacgaatatctttgccctcaatatccggtagcctgacctcgataacctgcccggcgttgatggagcaggactgcggcacggtaatggtcccggacatggtgacgtgcgccatcggtggaacggaagggggaatattatctccgctgctgcccggcgtttttgacaaatagagattcataatcgtcgtctcaggaatggtgatttcacctaccaatgggtgagtaatataaatacgcacgttacccttattccctgcggacattttgtttatgtccgcgcccgtacacccgcctgcggtggggtcctgattactgatcgctgaaaagggaacggggatatactgtttcaggttaccgacgatgtaggtttccgtaccaatctccagcttacccgcgaccagaacataaaaatccatctgttgcccattgctacccgcttcgctgtacgttcctttttgtgttaaatcgccggtcgtggcggtgaaatagttaacgccctgataatctttattatcgcagtcgcacctggcgctgtattcgccgccgaccgaccaactctctttgactattttccctgcctggttctcatccgtatcggtaatggtctggtcaaggggaaaaaagaaattatgcgtgccgctggtgggttgacaccagccgcttccgttgcccatcgttccgtctgccagcgcatggcctgaaaatagcgatagcgccagcagcatccataaattcttcattgtgttcctcactggcagacggcgttcgccatcactatgccgttcatatttttgctgatatccaggcggtaatccgcgcggcaagaggcgcttccccagttcaccagcagcaggccctcttccggcaggccgctgaggaagacctggcctttatcgccgacgatactggccaggttcgcatcctgcccatcgacgcttgccgtcgcgccaaagggcacgggctcgccattgctgcgcgtcagcgttaacaacacgcgatagcccttatgcgtgtcatacgccgcgcgcaccaccgcattacgcgtcgggtagacggtctggttgttgagcggaatatccacgttgtcagcaaacgtgctgctgtcgagcgagatatcgtagcgataatacggcgtgacgttggggatcaccgtataaccccggaagtcggtggcgacgccggtctggttttcaaccgaaacgccgctggcgccgggcgctttaattaaaatcgccgcgccggtaatcggctggctcagggtaataccgttttcgtgcgccagaatgccgccgctgatgccgtagctgacttgttggctatctggcgactgattgtaaccggcgttgaggttggcataagtgcctttatagctggcgtttaccccgccggaatcaccgtcttgtgtgctgtggctttgctgtaacgaccagttcaggtttctgtcacgcagcgcggtgccgctaagggtggtgctgttcaccgtggcatcgtgcttacgcgtgttcagcatatagctggcgtatagcctggaatcgaacaccgtaaacggaacgtgcagcgacagcgtgaacagccgatcgttctggttataacgatcgtcgtcgttgtcatcatcgtcattgtccgaacggtactggtaggtgtttttgttatagctgtagctcagcgtatagctcaccggaccccagctattgttgtagctggcgctcagggattccatctgctgcgcgctgtgccagtaatcttctttgacccaacttagcgttaaggaaccgagcgtattgctaatttgctggttgaccgaagcttcgaaacgattatggcgcttgccgtagttatcataaaaatcgtcgtccgggttgatcacctcgctcagcgaattgtagttttcgctggcgtaacgatagccggccagcgaaaacgtggtgcccgtactgacgacgcccttgctgtagcggacgtgccaggattgcccgatttctttgcggccatcgtcaaatttggcgtgcgaccagatgccgtccagggaaatggcccccagcatctgcatattttgcccgacgccgaaggcgacggactggtatttatcgccggcaatctggctgccgccgtacagggtgatgccccacggcaggccgtacagcagggtcgcctggccgaagtcgtccagcgcgtggttgttataatcgcgatatttacccacggtcacgctgtattttgcccgtccggtgcgctgcagaatcggcagcgaagagtagggcacgataaaatgctgttcgctgccgtcggcttcttttaccgtcacgtcatagtcgccgttgctgccggtgggaaacatatcgttgatttcaaattcgcccggcgaaacggcggtctgataggcgatatagccgttttgccgcacgataacctgcgcgtttgagcgggcgatgccgcgaatcgtcggggcgtaaccacgctggctgttgggctgcatttgatcgtcagaggtgagctggaggccgcgaaaaggtacgctgtcgaacacgtcggatggcgtattgctgtctccggcggtgaactggcttttcagcgcgataatgtcgcgctgtaaatagttataaacgctgttccagctaccgttctcgccgttatttgaactccagttactgtagttgcgaaaacgccacggcccgaggttaaaacccggctggagagcgagatacttcgattccgcatcgtcggaatcctcactggaaccgtactctttatagccgctgaagctgtagttcagcatcagcgcggtaatcccctcctgccacttttccggcggtacgtagccgcgtgcgttgttggcgatgtagagttgcgggatgcttactgataatgcctgttgctgaaaatcaaaccgctggctggcgccggggataacgctgagatcgacgcagcctttttcactctccagcgttggaaaaaggtcggttttgacgccgttatcttttagttcctggagccgtaaacagccctgtaatgcctgttgaccgtcactgagcgtcgcgagttgaaaatcaacgtttcgtgcgccgatttctgttttattgatattgatagtgacgtaataggtgccaggcagctggcttttgtcgttatcaaatgtcgacagatcgacgcttgtgcgattcgcctgcccatggttttcaataaatgccggattgaaatagtcgcgcgcccatgcaacgtgtgtgaacgtgctgcccagcgcgatacacacagcgcagcgcgataaataaaatacccggtgttgccttttgcgcatcggcactctcatccctgtcactcttctcaaggcgtttgtttatgttcggggccagtaccgccaaaatcgttgatgatagaccagacaatcgggccgctggcggcggcaggcagcgtgtactgcgcgttgccgaaaggcgccacatagcgcggggctttcactttttgactgccaacggaaagggtggcgaagttcatataatagggcgtggggttcttcacggtgagcgtgcgaccctgacgcgaccacgttaaccgatcggcaacctcttctggtttttgggttaacgcttttggccggtaaatcagcttaaattccgctttaacggccagcatgagtgtgttgtgtttattgtccggattgctgctgggaatcgatttaatatccagccagtacagcgactcgcgatcttccggcaaattgccgccggtacggataattcgtagtacgttcttttgcccgccattaaggcgaaaaagcggcggggtgaccataaacggcgcatcaccgctcgccccggtttcactgatcgattgcgcccaggactgaattaaatagggaacgttgtcgctattgcttatcgatatggacgcatctttggcatcgccgtgaaaaataacccgcgttgtgccgatgtttatccctgcggcatgcgccagcgaaccgcacaacaggcaacaaagcaaccctgctttagccaatgaattcattgatgacctcaataaacaaaggggccagccgacgctggccaccaggatcagttatattgcagatagaatgttgcggttgcatcgaccgttcccgacttaacgggaaccgcggtggcgatatagcgggcggtgaaaggcattgagagttccgtcaccccctctgctgtagggaggttgactggggcagaccatgcctgaagatcgttaaaggtcataggggtgctagttttatcaagaatttgcacgccaatattctcagcatcatcctcatttttcaggatggtcgcatcggttccgtcgagtgtgccttcaaagcgcgcctgtacactgctgtagacgtttgcgtcgcagttttcgagttcgatggtgaagtctgtatcccctgccgtctgccctgcggcagtgaaaagagaggcaaattcttcctgtaatgtcacctctactgaatccgtttttaccgtacaggcgttttgcttaatgaggccggtgatatgtacggtgccgtctttggcggtgtctgccagcgcggcgggggagagggtgatggcggccagtgccacagtgagtgtttttaaggagagtttcattatctttgatcctttaagatattataaatattgacatagtaacaatatctatagtgtggaaagttattgttctttttattcccgaatgagtaaatataatgtccgatgatttttacggcgcgaagaaaaattcagaatacataaatatgaaatatttataatatatatttaatcaattattttggtgagtgtttgtttaattgaatcgccgtgattaccctttaatgggccagattctatgaaggctgctaacaattttaaaaataatgcaaattttttttgaataaaaaatgatcgtggtcatagtgtgttgtcggccaaaaaaacatgctgacatcatgcaggattggagctcaatggaggagaagttatgctgggatgggtcatttcctgtcatgacgatcgggcgcaggaaatgctcgaaggtcttgaaaagaagtatgggccgttggcgcagtgtcgggcggtcaatttctggcgtgggttaagcgtaaatatgctcagccgcatgatgtgtgacgccctccatgccaccgactccggtgaaggcgtgatatttttaaccgacatttccggcgcggcgccttatcgtgtagcgtcgctgatgagccataaacattctcaatgtgaagttatttccggtgtcagctattcattgatggaggaaatgattacctggcgagagtcaatgagcagttcagcatttcgcgaccagattgtcgcgcttggcgcgccggatgtcaccagtctctggcatcagcagcagaaaaatccgccttttgtattgctgcatgattcgtatgagttttgatcaataccattgacgacgcttttgctacaatgacggcgttttttcgcctcggttatgatatatggttatgcgcgttgttcttatcttgctgttctttttcgccggtaatgtgttggctgccttgcccgctcgttatatgcaaacgacgaaagatgccgccatctggtcgcagattggcgacaaaatggtgaccgtagggaatatccgcgccggacaaattctttccgtaacgcctgttgcggctgattattatgcctttaaattcggcttcggtgtgggctttatcgataaaggccatctggaatccgtgcagggaaaacaaaaagtggaagatggcctgggcgatcttaacaagccgctcagcaatcagaatctggtgacctggaaggacacgccggtgtataacgcgccggacatcagtagcgccccgtttggcgtattggtggataatttgcgttaccccattattagcaagctgaaaggccggctacatcaaacctggtatcagatccgtattggcgacaggctggcttatgtcaacgccatggatgcgcaggaagacaacggcattccgattttgacctatcatcacattttacgtgatgaagagaatacccgttttcgccatacctccaccacgacttcggttcgggcattcagcaaccaaatgacctggcttcgcgatcgcggctatgccacgttgacgatgtaccaactggaggattacatctataaccgcgctaatttcccggcgcgcgcggtggctatcacctttgatgatggccttaaatcggtgagtcgctatgcgtatccggtattaaagcagtacgatatgaaagcgacggcatttattatctcatcgcgtattaagcgccatccgcaaaaatggaatcccaggtcgctgcaatttatgagcgtgtccgaattgcgcaagataagcgatgtttttgattttcagtcgcatacccattttttacaccgggtagacgggcatcgccgcccgattttatatagccgcagctaccataatattctgtttgattttgaacgctcgcggcgggcgctcgcacagtttactccgcacgtattttatctttcttatccctttggcggttataacgcgaccgcgatcaaagcagcaaaagacgccggtttccatctggcggtaaccacggtgagagggaaggtgaagccgggagataatccgatgctgctcaaaaggctgtatattctgcgcacggattcgctggaaaccatgtcgcggctgatcagcaaccagccgcagggataaggactatcaggcaacctgtaccggaatagctttcgcggtgcgcttcatttcgttgtcgccttcaaaataggccactttcggacgccatgtacgcgcttcttcatcagacatggtgacgaagctggcgataatcacaatgtcgccaacttcagcgcagtgcgccgccgcaccgttcaccgagatgattctggagccgcgttcagccgcaatcgcataggttgagaaacgtttcccattggtcacgttccagatatcaatcgcttcgttttccagaataccggaggcatcaaggaaatcctggtcaatggcacaggaaccttcgtagtgcaggtccgcctgcgtgacttttacgcggtggagcttgccttgcagcatggtgcgaatcataacttctttaccctgtcgtttaccttggctaagcaggcgcttgtggcctgctttggaaattctcaggcagtattgcccgatttttaacccctgtctactgggctaatgtaacgctttgattatcgatcagacgcgcctgacccagccaggcggcagccagaatcactgcgcgtttgctggtttccgtcagctccagcagcgtgtcggcatcacggatttgaatgtcgtcggcacggaagcctttttcattcagttcctgttcggcaatggcaataatctcttgcagctcacgattacccgcaatcagtttttcagcgatgctattcatcacgttgtatagacccggcgcaattttgcgctgctctgcggtcagataagcgttacgtgagctgagcgccagaccgtctttagcgcgaataatcggcacgccgacgatctcaatgtcataactcatatccgccaccattttgcggatcagcgccagttgctggaaatccttctcgccaaagcaggcgatatccggctggatcaggttgaacagcttgctgacgatagtcgagacgccgcggaaatgacctggacggctggcgccttccagcatggtagagaggccgggaacatcaacgtacgtctggccttccagcccatgcgggtagatttcctcaacggctggcgcaaagacataatcgactttgcgtttgttcagcttttcacaatcttcctgcagcgtgcgcggataacgcaccagatcgtccggccgatcaaactgcatcggattgacgaaaatgctgacgatcaccacatcagcccgggcttttgcctcatcgaccagcttcatatggccgtcgtgcaggttgcccatggtgggaaccagtgcgacgcgtttaccttcctgacgcagacgacgaatatgctggcgcagcagcggcagggtttcaatgattagcacaacaaaactccttgagttgcttgatgatcctgcccgatggcgctgcgcttatcaggcctacatccgttgaggatctgtaggccggataagacgcgtcgcgtcgccatccggcacggtcagaaaaattagtgaaagctgtgttcttcgcccggataaacgccggactccacttcagccatatactgctgtacggcggcgcgcatgtcgcccgcttcggcgaggaaatttttcgcgaattttggaatatgaccgccggtgatgccaaacgcatcgtgcatcaccaggatctgaccgtcggtgacgttgcccgcgccgatgccgatcaccggaatcgacagcgcttccgtgacgcgcttcgccagctcaaccggcacgcactccagcaccagcagttgagcgccagcggcttctaaagccagcgcgtcatccagcagcacttgtcctgcatctccacggccctgaattttatagccgccgaagatattcaccgactggggcgttaaccccagatgaccacaaaccggcacggcgcgttcggtgagcattttcaccgtatcaaccagccaggcgccgccttcaattttgaccatattggcccccgcacgcatcacgatagccgcgttttcacatgcctgttccggggtggcgtaagccataaacggcaggtcggagagcaatagacagttgggcgcgccgcggcgtaccgcgcgggtgtggtaggcgatatcttccacggtgacaggcagggtggagtcgtgcccctgaattgtcatgcccagagagtcgccaaccagcatcacattgataccttcgtcggcaaataacttagcgaagctgtagtcgtaggcggtaattgtcgcgaagcgttttttctcttgcttgcatttctgcagcagtgaaatggtggtgggtttcataacgtttcctgatggtaaaagttatatttcccggcattctaacagtcatattcaggggggcaattgatttaagcaatcgtttggcgctaaagcagtaaacgctaaaggggaggcgatgttttaccagtgggcgggttttgcagcaccaagatgggtgagatgctgatgcaggctgataccatccggaaagatcagatcaggagcgatttcgaataacggccacagcataaaaccgcggtttttcatgtcgtagtgcggcacggtcagacggtcggtgttaatgacttcatcgccaaacagcataatgtcgagatccagcgtgcgcggcccccagcgttcggctttgcgcacccggccctgttgcagctcaatgcgctgggtatggttaagcaattcttcgggggcgagagcggtatccagcgccaccgcagcgttcaggtaatcgggctgatcctgtgggccaagcggcggcgtgcggtaaaacgaagaaaccgcgacgatacggctatcgggaatgtcggcgatagccttcagggcggcattgacctgctccagcggagaggccagattactgccaagcgcgatatacgcgatcgtcatacggtgccctcgcggcgcggcgcgcgtttgcgcggacgtgaacgacggcggcgtggagcaggatcgtcgtccagctcgttgagcatccctttttgttccggcggcgcggaagcctgaaactcggcccaccactgcgccagacgttgcagttcagtattattttccacctgagcgcgcagctccagtaaatcaaacgcggcgcggaatttgggatgttccatcagtttccaggcgcgtttgccctgacgtcgcgacatgcgtaactgaagctgccaaatatcacgggtaagcgtggtaaggcgtttcgggatcgccagtgaacggcaggcctcatccagcacatcattcatggccagcgcgaaagcgtcgtaataggccagaccgctctcctgagcgattttttgcgccatctccagcagcggataccagaacatggcggcaaacaaaaatgccggattaacgcgcatctcgttacggatgcggttatccgtattcttcaacacctgcgcaatgatgcgttccattgcgctgtcgccgttttcggtgaaataacgcgtaatggtaggaaacaacggctggaagaggtggtattcccgcagttgttgataggtttcgtaaccgttccccgcctgcaacagcttcagcgactcttcgaacaggcgcgcgggaggaatgtcgtttagcaaggttgccagacgcgggattggctcagccgtttcagggctgatatgcatattgagcttcgcagcgaaacgcacggcgcgcagcattcgaaccggatcttcgcggtagcgcgtttccggattgccgatcaggcgaatcacgccttcttgcagatcctgcatcccgccgacgtaatcgcgcacggtaaaatccgccacgctgtagtaaaggctgttgatggtgaaatcgcggcgctgggcatcttcttcgatagagccgaagatgttgtcgcgcagcagcataccgttttgcccacgctgggaggtcgtacggtcgctttcactgccttcatgatgaccacgaaacgttgccacttcgataatttccgggccaaacatcacgtgagccaggcggaaacgacgtcccaccagacggcaattgcggaataatttccgtacctgatccggtgttgcgttggtagtcacgtcgaaatccttcggctttttgccgagcaggagatcgcggacgccgccgccgaccaggtaggcttcatagcccgctttgttcagcctgtacagtaccttgagggcattttcactgatatctttgcgggagatagcgtgctgttcacgcgggataatcgtcatatgtggacgggcgacggcttgttctgcctcgctctcctcgcggcttaacaccttacggcaaaaattagcgactcgggtaaaaatagcgcacctcggtagtgtcatacattaataagatcaacttactctatgtctttcgcattacggcagacgggcgtaagagagcaacgcgacctgggctgtaagcatcattaacgccgcagcaatgcgaaagacgatgagcaaaaatagcggctaatcatagctcagcgagacgcatttgagaatgccggatttacattagccgatgtgggtacggctgtaagcctccagtgcgccactgcaaagcgcagcaactcctcaacagacatctcctgccacgctacgacgtcgcgttggcctaaaaagcgcaatgcctggaccagtaccgggcgcggatcgcctgtcgcaagcgcaggggcatgattttgcttggaaagtttagcgccttgttcgttgagcgccagcggaaggtgcacgtagcctggcgcacgccagccaaactgtttatacagcgaaagttgtcggacagtgggttcgattaaatctgcgccgcggacgatctccgtcaccccctgaaaatgatcgtcgaccaccacggccagattataagcaaacagtccgtcgcggcggtggataataaaatcttcgctcgccagctgtgggtcagcctggatgtcgccgcgcaaggcatcatggaaatgcatcaccggatgctgctgtttaattctgacggcggcattctccggcccgtggcataacgtccgacaatggccgtcgtaaataccgcccagacgttgaatgcgcgagcgggggcaagtgcagtagtagctcagtccctgctcgtgaagccaggccagcgcctcgcgataagcctcatgacgctgtgattgccataagacctcgccatcccagtgcaggccgtaatgttccagctggcgcagaatggtcgctgcggcaccgggaacttcacgtggggggtcgatatcctcgatgcgaacgcgccaaattccgcgttgcgcacgggcttgtagatagctgccgagggcggcgattaacgagccgaaatgcagttcgccggatggcgacggcgcgaaacggccaatatagtgtgagtcagtcatgctgcgggcaataaagaataaggcgggaaaactcccgcctgtcataaatagggtagaaacgaacgggattaacccgccatctgtttttcgcgaatttcagccagcgttttgcagtcgatgcacagatcggctgttggacgcgcttccaggcggcggataccaatctccaccccgcaggactcgcaataaccgaagtcttcatcttccactttcttcagcgtcttctcgatctttttgatcagtttgcgctcacggtcacgattacgtaactccaggctaaactcctcttcctgcgcggcgcgatcgaccggatcggggaagttggcggcttcgtcctgcatgtgcgtcacagtgcgatcgacttcatcccggagttgattacgccatgcttcaagaatacgcttgaagtgcgatagctgggcttcgttcatatactcttcgcccggtttctcctggtacggctccaccccagcgatggcgagaatactcagggacgatgttttacggttttgcccttcttgcatgttgcttctccttaacacgcactatcgatccccatgttcgggggaaaatcaggtcgctataaatagcagatgcttttccggatagcaattatctaaacgtaacacttgacaaccctgtgaggaaaagcgtatttacgcacgcggccagaatacttaataatcaggctgttattccactacaacgttatgggtactggttcgttcagttccattttttgggctgaaagttctgctttataagctaaaacttccacgcctttattctgagcctcgctcaatagctgcgcgtattttatatcgatatgacgtgcgggggaaaaacgtgtaatggcggagtgcagcaccgcgaacaccaccactgcgcgatgacctgccgccgcaacgcccatcaattcccgaagatgtttttgccctcgttcggtgatggcgtcgggaaaataaccgttttctttttccgctaacgtgaccgatttcacttcaatatagcagtccgggcggaaatctgcctgtaacataaaatctatacggctgcgctcggcgccatatttgacttcacttttcagaatattgtaccccgccagcgccggcaggcgattctcctgaatcgcttctttcgttagctggttcgcccgcagcgtattcacgcaaatgaatgcgccggattgcgtttcagtcaattcccaggtatgcggatatttgcgtttagtattttctgatgtcgaataccagacggtatcgccaggcgtggcgcagccggtcatcgcgccggtattaggacagtgcagcgtaagcgtcgtaccgtcaggggtgatcacatcggctaaaaaacgtttatagcgctgaatcagcgtagcgcgttgtaaagggggtgaaaatagcatcgacattccttcattattattcgcccagcgtccagcgctgcagctcggcatagcgggtacggccttgcccatacgaagaggcgtaaagcgcaaacgacgtgaccggaaatgaccagcaaaagcccggcggcgggatagccaccgtatggctggcgtcgcgcagcagcgtaatatgcgggtgaaaaggctgcgggctttggtaacaaccgctgcgggcggcctgcgcgcgcagcatattagccaactgcaacaacccgcgcggcggctggcgcatccccagccacaccacgcgcgaacgcagccactgaccggcgtcatccagatgtagcgtaaagcccggctgtcgaattcgtccggccagttgcgcaagcgcgcgctgcttatcgctactgacgtcgcctaaaaaggccagcgtcaggtgcaggttcgccgctgccacggggcgtccgtcttcagacgcaaaatgggcggcgcgccaggcgataatttgcgcgcgcgcgtcgtcgggtaagtcaatcgcaaaaaacagccgttttggctcagacatagggatactcggttatggattaacacgatgctacaatgcggcgcaaagaaagttaaccccgtggagccgtttgtgacgtcattgcccgttgccgccgtattgcctgaattgttgacagccctaaaaatcgcgccgcaggttttgttgtccgcgcctaccggggcggggaaatccacctggctgccgttgcaactcctgcaacaggggccggttgctggaaaaatcctcctgcttgaaccgcgtcgtctggcggcgcgtaatgtcgcacagcgtctggcggaagcgttgaatgaaaagcctggcgaaacggtaggttaccggatgcgcgcgcaaagctgcgtggggccgcgtacccggctggaagtggtgaccgaaggcgtattgaccagaatgattcagcgcgatcccgaattacgcggcgtggggctggtgatactggatgaatttcatgagcgcagtttacaggcggatttagcgttggcgctgttgctggatatccagcaagggctccgtgacgatctcaggctgttaatcatgtctgcgacgctggataacgacaggctttgtcagcgactgcctgatgcgccgacgatcgtctcggaggggcgcgcgttcccggtggagcgacgttatcagccgcttgcggcgcatttgcgttttgatgaagccgtcgcgatggcgacagcggaactgctgcgcaatgaaaacggttcgctgctgctatttttacccggcgtaggcgaaatacagcgcgttcatgaacatctggcgtcgcgggtagggagcgatgtcctgctttgtccgctgtatggcgcattgtctctggaagcgcaacgcaaagcgattgttccggcacccgccgggatgcgtaaagtggtgttggcgactaacattgccgaaaccagtttgacgattgaagggattcgtctggtcgtcgatagcgctcaggagcgcgtggcgcgatttgacgcgcgaacgggactgacgcggctggttacgcagcgtatcagtcaggcatcaatgacgcagcgcgcggggcgcgccggacgactggcgccgggtatctgtttacatctgctggccaaagaacaggcggagcgggcggcggcgcaaagcgatccggaaatcttacacagcgacctttccggtttattgatggaggtgttgcagtggggatgtcacgatccggcatcgcttttctggctggacaggccgccggaggtgaatcttcaggccgcccgccgtttattattgatgttaggcgcgctggagggcgagcggttaagcgcgcggggccggaaaatggcggcaatgggtaacgatccgcgcctggcggcgatgttagtcaacgccggcgagggcgatagcgccgccactgccgccatgctcgcggccatccttgaggacccgccgcgcggcggcggtacggatttaagcgtagtattttcgcggcgacagccgggctggcagcagcgtagccagcagcttttaaaacggctgcaggtgcgtaatggcgagccggatagcgcgcttattatgccgctgttggccagagcgtttagcgaccgcatcgcgcggcgtcgtggtcaggaagggcgctatcagttagccaatggtatgggcgcgatgttagatgcggatgacgcgttgggacgtcatgaatggctgatcgcgccgctgttactgcaaggtagcgcctcgccggacgcccgaatattgttggcgcagccgctggatattgcctcgctgattcaggcgtgtcctgatttactgcgccagtccgacacggttgaatgggacgaggcgcagggaacgttgaaagcatggcgcagaatgcgtattggacagttgacggttagcgttcagccactggcgaagccgtctgaagaggagcttcatcaggcgatgctgaacggcatccgcgataaaggtctgtccgtccttaactggacgccggaagcggagcagttccgtctgcgtctgcactgtgcggcgaaatggctgccggaatatgactggcctgccgtggatgaggcgtcgctgctggcgactctggaaaattggttgctgccgcacatgacaggcgtacagtcgttacgagggctaaaatccctgaacgttaatcaggcgttacggggactgcttgactatgccatgctgcaacgtctggatagtgaactgcctgggcattacactgtgccgacgggaagccgaataacgattcgttatcatgaagataacccgcccgcgctggcggtcagaatgcaggaaatgtttggcgaagcgaagaccccaaccatcgctcagggccgcgtgccgctggtgctggaactgctttcgccagcgcagcgaccgctacagattacgcgcgatttaagcgctttctggcagggggcgtatcgcgaagtgcaaaaagagatgaagggccgttaccccaaacatgtctggccggacgatccggcgaatacggccccaacgcggcgcacgaagaagtattcgtgacgtgttatacgttgcctccaggccagataaggcgttaatcgccatccggcaaaagagtaaattgagagatttcttcttctgtcgtctggcggaagaatagagaatcgggcctttgcgcctgtatgttgcggagaaaaagcatggcggggaatgaccgcgagccgattggacgtaaggggaaaccgtcacgtcctgtgaaacaaaaggtgagccgtcgtcggcagcatgacgacgattatgatgatgactatgaggatgaagaaccgatgccgcgtaaaggtaagggcaaagggcgtaagcctcgtggcaagcgcggctggctgtggctattgctaaaactgtttatcgtttttgtggtgctgttcgccatttacggcgtctatctggatcaaaaaatccgcagccgtatcgatggcaaggtctggcagcttccggcggcggtatatggccggatggtgaaccttgagccagacatgcctgtcagcaaaaacgagatggtgaaattgctggaagcgacgcagtatcgtctggtgacgaagatgacccgtcccggcgaatttaccgtgcaggccaatagcattgagatgatccgtcgtccgtttgacttcccggacagcaaagaagggcaggtgcgcgcgcggctgacgttcagtgacgggcgtctggaaaccatcgtcaatctggataacaaccgccagtttggcttcttccgtctcgatccgcggcttatcaccatgctttcttcgccaaatggcgagcagcgtttattcgtcccgcgcagcggtttcccggatctgctggtcgatacgctgttggcgacggaagaccgtcatttctatgagcatgatggcattagtctttactctatcgggcgtgcggtgctggccaacctgacggcgggacgcacggtgcagggggccagtacgctgacccagcagctggtgaagaacctgttcctctccagcgaaagatcatactggcgtaaagcgaatgaagcctacatggcgctgatcatggatgcccgttacagtaaagatcgtattcttgagctgtacatgaacgaggtctacctcggtcaaagcggggacaatgaaattcgcggttttccgctggcgagcctgtattactttggtcgtccggtagaggaactgagcctcgatcagcaggcgttactggtggggatggtaaaaggggcgtcgatttataacccgtggcgtaacccgaaactggcgttggagcgtcgtaacctggtgttacgcctgttacagcagcagaaaatcatcgatcaggaactctatgacatgctgagcgcgcgtccgcttggcgtacagccgcgcggcggcgttatttcaccgcagccagcgtttatgcagatggttcgtcaggaactgcaggcgaagctgggggataaaattaaagatctctccggcgtgaagatcttcaccacctttgactccgtggcgcaggatgccgcagaaaaagccgttgtcgaaggtattccggcgttgaagaagcagcgtaaattgagcgatctggaaaccgcgatggtggtggtggatcgctttagcggcgaggtgcgcgcgatggttggcggggcggagccgcagtatgccggctataaccgtgccatgcaggcgcgccgttccatcgggtcgctggcgaaaccggcgacctatctgaccgcgttaagtcagccgaacttataccgtctgaacacctggattgccgatgcgccgatttctctgcgccagccgaatggtcaggtctggtcgccgcagaacgacgatcgtcgctacagcgaaagcgggaaagtgatgctggtggatgcgttaactcgctcaatgaacgtaccgacggtcaatctggggatggcgttaggtttaccggcggtaaccgatacctggacgaagctcggcgtgccgaaagatcagctcaatccggttccggctatgctgttaggagcgctgaacctgacgccgatcgaagtggcgcaggcgttccagactatcgccagcggcggaaatcgcgcgccgttatcagcgctgcgttcagttattgcggaagatggtaaagtgctgtaccaaagttatccgcaagctgaacgcgccgtaccggcacaggcggcttacctgacgctctggacaatgcagcaggtcgtccagcgtggtacggggcgtcagcttggcgcgaaatatccgggtctgcatctggccggtaaaaccgggacgacaaacaacaatgtcgatacctggtttgccggtatcgacggcagccaggtgactatcacctgggtaggccgtgataacaaccagccgacgaaattgtacggcgccagcggcgcgatggcgatttaccagcgctatctggcgaaccagacgccgacgcctttagttctgacgccgccggaagatgtggtggatatgggcgttgattacgacggtaattttgtctgtagcggcggtatgcgcactctgccggtctggacggacgatccaaatacgctgtgccagcagggcgagatgatgcagcaacagcagcagccgtcaggcaatccgttcgatcagtcgtctcagccgcagcagcctgcgcagcaacagccgccgaaagaagagaagagcgacggcgttgccggctggattaaggagatgttcggcggcaattaatcacggtaatagtgccgggtggcgctgtgcttacccggtctacaccgttacgaccccattatgtgcgacgtaggccgaataagacgcttacgtcgccatccggcaaatcctccataaataacatttcagtctaatttattaacccttccttttcatctggttatttcttaaccccttagttttcgtagggccgcgtatcgcttgccattgcgacgatatttcgcctatcatgctgcggttataataataattatcgtttacgttatcattcactttcatcagagatataccaatggcgcgtcttaaaactgctcagccaaactcctcactgcgtaaaatcgcagttgtagtagccacagcggttagcggcatgtctgtctatgcacaggcggcggttcaaccgaaagaagaaaccattaccgtaaccgcagcgcctgccgcgcaggaaagtgcctggggaccggctccgaccatcgccgcgaagcgttccgccaccaccaccaaaactgatacacctatcgaaaaaacgccacagtcggtttcggtggtcactaacgaagagatgcagatgcatcaattccagtcagtaaaagaagcgttgggttacacgccgggtgtaacggtaagcagccgcggcgcttccaatacctatgacttcgtgattatccgtggcttctcttccgtcggcctgagccagaacaactatctggatggcctgaaattgcaggggaacttctacaacgatgcggttattgatccctacatgcttgagcgtgttgagttgatgcgtggcccaacgtccgtcctctacggtaagagcaacccgggcggtatcatttcgatggttagcaagcggccgactactgagccgctgaaagaaattcaattcaaaatggggacggacaatttgttccagaccggttttgattttagtgattccctggatgacaacggtgagttctcatatcgtctgacggggctggcgcgttcgacaaatgagcagcaaaagagttctgagtcgcagcgctatgcgattgcgccctcttttacctggcgtcctgatgagaaaacgaattttacgttcctttcttatttccagaacgaaccagagaccggctactacggctggctgccgaaagagggaacggttgaaccgttaccgaatggtaaacgcttgccgacagatttcaatgaaggggcgtcaaacaacacctattctcgtaacgagaaaatggtgggatacagtttcgagcatggcttcaacgacacttttaccgtgcgccagaatttacgttttgtcgaaatgaaaaccgcgcaaaaaagcgtctatggcacggggattgcggcggacggccatacgcttaaccgcggtactatcgttgacaacgagcgtttacagaatttcagcgtagatacacaactggaaagtaaattcgcgaccggcgatattgatcatacgttgctgacgggtgtcgatttcatgcgtatgcgtaatgatattaacgcgacgtttggtagcgcgccgtcaatcgatctctataacaattaccatcctgaatactttgctttcggcggcgctgagccgtaccagatgaacgaaagtaaacaaacaggcctctatgttcaggatcaggcggaatggaataagtgggtatttactctcggcggccgctatgactggtctaaacaagcgacaacggtgcgtcagaattccactacgccgacagaaggatatattgaacgtaatgaccaccagttcacctggcgcggtggcgtaaactacgtattcgataatggaatttcaccttacttcagctatagccaatctttcgagccaagcgccttcgatttgtggagcaccccacgcgtttcttacaagccgtcaaaaggcgagcaatatgaagcaggggtgaaatatgtaccgaaagacatgccggttgttgttacgggtgccgtttatcagctgaccaaaaccaataacctgaccgccgatccaaccaacccattagcgcaggtgccggcaggcgaaattcgtgcgcgaggtgtagagctggaagccaaagcagcattgacggctaacatcaatatgacggcgtcttacacttatactgatgctgaatacacgaaagacactaatctgaaagggaatacgccagagcaggtgcctgaacacatggcgtcgttgtggggcgattacaccttcaacgaaggtccgttgtcaggtttaacgctgggaacaggcggtcgttttattggttccagttacggcgatccggctaatagcttcaaggtaggcagcgcagcggtgatggatgcggtcgtcaagtacgatctggcgcgttttggtatggcgggctccagcattgcggttaacgttaataatctgctcgaccgcgaatacgtcgccagctgcttccagacctacggctgtttctggggcgcagaacgtcaggtcgttgcaacggcaaccttccgtttctaatttctttttgggcacggcttgccgtgcccgttttacaagttggctgcgatgcaggaaaaccacattcattccgataccacctttgcgctgcgaagcgtcgcctttcgtgtgccgggccgcacgcttttacaccccctctcgttaacgtttcccgcaggtcgcgtcaccggacttattggtcataatggttccggtaaatccacgctgttaaaaatgctgggccgccatcagccgccttccgaaggggatattctgctcgacaatcagccgctggcgagctggagcagcaaggcgtttgcccgcaaagttgcctatctgcctcaacaattgccacaggcggaaggaatgacggtgcgcgaactggtggcgattggccgctatccgtggcacggcgcgctgggacgctttggcgtcgcggaccgggaaaaagtagacgaggcgattacgctggtcggcttaaaaccgctggcgcatcgtctggtagacagtctttccggcggtgaacgccagcgcgcgtggattgccatgctggtcgcgcaggacagccgttgtctgctgctggatgagccgacgtcagcgctggatatcgcccatcaggttgacgtgctggcgctggtgcatcgtttaagccaacagcgcgggctgacggtggtagcggtgctgcacgatatcaacatggcggcccgctactgtgattatttagtcgcgctacgcggcggtgaaatgattgcgcaaggaacgcctgcggaactgatgcgcagtgacacgctggaacagatttacggtatcccgatgggtatccttccgcatccggcgggcgcggcacctgtgagttttgtgtattaatgcgtgatttatatcctcttactcgccgccgtttattaacggcgatggcgctctcgccgctgctgtggcaaatgaatacggcgcaggctgccgctatcgatccccgccggattgtggcgctggagtggctgccggttgagctgctgctggcgctcggtattacgccgtatggcgtggcggacgtgccaaattataagctgtgggttagcgaaccgccgttgccggattcggtgattgatgtgggtcttcgcactgaacccaatctcgaactgctgacggagatgaagccgtcgtttatggtctggtcggcaggctacggaccctcgccggagaaactggcgcggatcgcgccggggcgcgggttcgattttagcgacggcaaaaagccgctggcggtggcccgacgctcgctggttgaactggcgcagacgctgaatctggaagctgcggcagaaaaacatctggcgcaatacgatcgcttcatcgccagccagaagccgcattttatccgccgcggggggcgtccgttactgatgacgacgcttatcgatccgcggcatatgctggtgctcggcccgaattgcctgttccaggaggtgctggacgagtatggcatcgtcaatgcctggcagggtgaaaccaacttttggggcagtacggcggttagcatcgatcggctggcgatgtataaagaagcggatgtgatctgcttcgatcacgggaataacaccgatatgaacgcgctgatggcaacgccgctgtggcaggccatgccgtttgtccgcgccgggcgctttcaccgggtgcccgccgtttggttctatggcgcgaccctctccacgatgcactttgtccgcatcctgaataacgtgttgggaggcaaagcgtgagcagaaaacgtgaaatgccggatggcggcgcgaaaagcgtcttatccgacctacggttcgggcgctttgtaggccggataaggcgaagccgccatccggcgttgctgttattggcgctgtttgttgccgcctgctggctgacatgggttaacttctccgttgcgctaccgcgcagccagtggcaacaggctatctggtcaccggatatcgacatcattgagcagatgatttttcattacagccagctgccaagactggcgatttcgctgctggtgggcgcggggcttgggctggtaggcgtcctgttccagcaagtattacgtaacccgctggcggaaccgaccacgctgggcgtggcgaccggcgcgcaattggggatcacggtgactacgctttgggcgattcccggcgcgctgaccacgcagtttgccgccctgacgggagcctgtatcgtcggcgcgctggtgttcggcgtggcgtggggcaaacgtctgtcgccagtgaccctgatcctcgccgggctggtggttagcctctattgtggcgcaatcaaccagttactggtgattttccaccacgatcagttgcaaagcatgtttttatggagcaccggaacgctaacgcaaaccgactggagcggcgtgcagcgtctgtggccgcagttgctgggcggtgtgatgctcacgttattgttgttacgcccgatgacgctgatggggctggatgacggcgttgcgcgtaatctgggtctggcgctgtcgttagcgcgtctggcggcgctgtcgctggcgattgtgttgagcgctctgctggtcaacgcggtgggcattatcggttttatcggcctgtttgcgccgctgctggcgaaaatgcttggcgcaagacgtctgctggcgcgcctgatgctggcgccgctcattggggcgcttattttgtggctatccgatcagattatcctttggctaacccgcgtatggatggaggtttccaccgggtcagtgacggcgttaatcggcgcgccgctgctcctgtggctgctgccgcggcttaaaagcatgagcgcgccggatatgaacgccagcgatcgtgtggcagcggaacgtcggcacgttcttgcttttgccgttgccggtggcgcgctcctgctgctggcaacatgggtcgccctctcttttggtcgcgacgcgcacggctggacgtgggcgagcggaacgctgcttgaagaactgatgccgtggcgctggccgcggatactggcggcgttaatggcgggcgtcatgctggcggtggcgggctgcattattcagcgtctgaccggtaatccaatggccagcccggaagtgctggggatcagttccggagccgcgtttggcgtggtgttgatgctgtttttggtgccggggaatgccttcggttggctactgcctgccggaagcctgggcgcggcggcgacactgctgattattatgatagccgccgggcgcggcggtttctcgccgcaacggatgttgctggcggggatggcgctcagcaccgcgtttaccatgctgctaatgatgctccaggcgagcggcgacccgcggatggcggaagtattgacctggctctcaggatctacctataacgccactggcgggcaggttacgcgaaccgcgatcgtgatggtgattttgctggccattgtgccgttgtgtcgccgctggttaacgattttgcccctgggcggcgatgccgcgcgtgcggtgggcatggcgcttacgccgtcgcgtatcgcgctgctggcgctggcggcttgtttgacggcaaccgcgacgatgaccattgggccgctgagtttcgttggactgatggcgccgcatattgcgcggatgctcggttttcgccggacgatgccgcatatggtcatctcggcgctggcagggggcgttttactggtctttgccgactggtgcggcaggatggcgctatttccgtatcagatcccggcgggactgctttcaagctttattggcgcgccgtactttatctatttgctacgtaaacagagtcggtaaaaaaaagctgtgccacatttatgtcgggtggcagccatgctcaacccgacctacaaattacacaatatcaatatgttgtggcaatattttgtaggcctaaaaatagctgaacgctatcaggtgcgagagctgtcctgtcacgttttatcgagggaactctgcttttattttcagcaagaagcaggtgttatttttgtatcgataagtcatgagctatttcagtggcgcgccgctgtctcgtgaacagggtgactcatttcaacatatccaggcccgaaacgttgatgataaattgcggcatgatctatccaataataagaattaccggtttcggtattaagcctttttaaatattaagatgcggatgccgcatctttaatgcatctcgtaaatcaattttaatttaataataaattttcattataaaacttcgataataaaatattatttttttatcgaagtaataaaaaacaactctattaaaataaattaattgccacgagtaaacaaaaaaaatgtaatttagcattttttgttttttttaatgaaatttataccaaaaataaatgttacgcgtcattgctatatattcagtactgtaattctgatctttttttattcattttgacatgtttattgtttttttggctctcccgtcttgcttgctttgtttgttttttgaacggtaaaaatatttattatttaattctgataatcctttaaataaaaaacgcttgtctttgggtttttaatggaaaatacttcaccgcgcctaagggatgttatttattaacgtgttgtttgcttcttttgaatgttgcatcggcaatttcataactcgtcatataatatatatctactaatataaacatggggtattgagtataactctgtgtgaatagcgtaaaaatactcaccaacttttaataaggatgaaaaatgaatacagcagtaaaagctgcggttgctgccgcactggttatgggtgtttccagctttgccaatgctgcgggcagtaatactggtacggtgacttttaccggtactattgaagattcaccgtgttcaatcgtggttggcgacgaacaccagaccgttaacctgggccatatcggtaccggttctctgatgggcggtaaagaatcttcaaaagtcgatttccatatcggtctggaaaactgcgcattcaccactgagaaagaagcgtctaccgttttctctgccatcggtaacgaatccagcgctaatccgggcagcgttgcgctgatgcgtatcggcggcggcgaaatggcgggttccagcattgttatcggcaaccacctgggttccgcgatcaaattgggcgacgcttacagcgaaaacctgacgatgaacggcagcgttgcggcggcgaaacagactcttaacttcaaagcctgggtgaaaggcgattctgctgccaccactatcgataccggcgaattcagcagcaccgtaaacttcacgatcagctatctgtaagtgaaatatcatcctgcggcagtctgccgcaggatgatgctcaaagtaaaaaaatagattatatatttcagggatagattgtctgatggctcactataaaaaatttcgtctgagcacgcttgcggccgtggtgggtattgttctggctgtcggtccggaaaatagctacgcggaagcgcccattcaatttaatacccgatttcttgatgttaaagatgatgccagcctggatctctcccgtttttcccgtaaaggctacattatgccggggagctatcatctccaggtgctggtcaatcagagtcaaattgtccaggataatgttattacgtattccgttgataataacgatcctgataacacctatccctgtttatcgcctgaactggtctcgctgctggggttaaaacctgaaatagcagataaaatgatctggataaatgccggtcagtgtctgcaaccagatcaactggaagggatggaaacccaaacggatttaagccagtcaacgctgacggtgattattccgcaggcgtatctggaatacagcgatgaagagtgggatccaccttcccgctgggatgaagggattcccggcgtattatttgactacaacgttaacagccagtggcgacatgctgaacatgatgacggcgatgaatatgacatcagcggcaacggcacggtgggtgccaacctcggcgcgtggcgtttgcgcgcggactggcaggctaactatcgtcacgaaaatgacagcgaagataaagacaactttggctccagttccgaacagaactgggactggaaccgctattacgcctggcgggcgatcccgcagctccgggcgcagctaacgctgggcgaaggatcgctggaatccgatattttcgacggctttaactatgttggcggcagccttatcaccgacgatcagatgttaccgcctaatctgcgcggctacgccccggatatatcaggcgtggcgcgcaccaacgccaaagtcaccgtgacccagcgcgggcgggtgatttatgagtcgcaggtcccggctgggccgtttcgcattcaggatattaatgaaacggtatccggcgatctacacgtcaaaattgaagaacaaagcggtcaggtgcaggaatatgacgtcagcaccgcctccattccgtttctgacccgtcccggccaggtgcgctacaagttggcagccgggcgaccgcaggactgggatcacaatatggaaggcggctttttcacctcagccgaagcctcctgggggatcgctaacggctggtcgctgtacggcggtgccatcggtgagcaggattatcaggcgctggcgttaggactggggcgcgatctggcgctgctgggcgcgttttccgtcgatgtcacccattcccgtgcgacgctgccagagggtagcgcctacggcgacggcaccattcagggtaactcgttccgtgccagctacgctaaagattttgatgatatagacagccgtctgacgtttgctggttatcgcttttccgaagaaaactacatgacgatggacgagtttatcgatacgcataatgacgataacgatcgtcagcgcaccggccacgataaagagatgtataccctgacgtacagccagaacttttcggcaataaacgtcaacgcctatatcaactacacccatcgcacctactggaatcaacctaaccaggacagctataacctgacgctgtcgcactatttcgatgtcggtgaggtgcgcgggatcagtctgtcggtgaacggttttcgcaacgaatatgacaatgagcgtgatgacggcgtgtacgtctcgctcagtattccgtggggcaacaaccgcacgctgagctacaacggctcctttagcgatgacaacaacagcaatcaggtcggctattacgagcgcattgacgatcgcaataactaccagatcaacgctggtcgcgcggataacggtgcgactctcgacggctactaccgttatcaagcgagctatgccgacattgacgtcagtgcgaactatcaggaaggcgactatacctccggcggactgaacatccagggcggcgcgacgctgactgctaaaggcggggcgttgcaccgcaccagcgtcaacggcggctcgcggctgctggtggatgtcggcgatgaagcgaacgtacccatctccggctacagcacgccggtatataccaacgcgtttggtaaagccgtcattgtcgacgtcaacgactactaccgcaaccaggtgaaaatcgacattacccagttgccggaagacgcggaagcaatcctctccatcgctcaggcgaccctgacggaaggggcgatcggttatcgccgcatggaggtgctcagcggtaaaaaagccatggccagtatccgcctgcgcgatggcggcacgccgcccttcggcgcagaggtttacaacagtcgccagcaacagttagggatcgtaggtgaagacggcagcgtttatctgatcggcattaaccccggcgagcggttgcaggtgacatgggaaggtaaaacgcagtgtgaagcgacgttgcccgatccgctgccgggcgatctgtttagcggcctgttgctgccgtgcatcggcgacgcttcatcacctgaggcaacgcagcccgaagagaaaccattactccagcttcatacgcagcggcggacgtcttcgacgcaacccgaagcgctctcttctcgttatccaacacattgattcaggaaaccgcattcatgatgtcattaaaacgttataacctggccgctgttttgctgcttttgctgggcggctacggtagcgcccaggccgccatcgcgcccgatcgcacccgcctggtgtttcgcggcgaagataaatcgataagcgtcgatctgaaaaacgccaacagcaaactgccctatctggcgcagtcctgggtggaagatgagaagggcgtcaaaatcacctcgcctttaatcgtcgtcccaccggtccagcgcattgagccgtcggcaatcggacaggtcaaaattcaggggatgccggcgctggcgtcgctcccccaggatcgggaaacccttttttattacaacgtgcgcgaaattccgccgcaaagcgacaagcccaatacgctgcaaatcgccctgcaaacgcgcatcaaagttttttaccgcccgcaggcgctatcgaaaatcgatatgcagcatccctggcaatacaagatcacccttcagcgtcagggcaatggctatcaggtgagcaacacaaccggctactacgtggtgttaagcaacgccagcaaccgcatggacggcacaccagccagaggctttagccctttagtgattgcaccaaaaagcaacgtgacgctgggaggggacgccagtgaattaggtcactcgcctgtgctgacttacgtcaacgattatggcgcgcggttaccgctgatttttaactgtactgacaacagttgtgcggtagatgaagcaaaaagcagaaagtcgtaaccgacaaggagacgcaagatgaggcaatggcggttacggctgggcacggtaacgtgtgcggccatgctgagtgcggtcagtatgccgctggcagcgggaagtaagacggtcaacatgacgctgacgatagtcgttaatgccgcgccgccctgtactgtgaccggcggtgaggtggaatttggcaatgtgttgacgacgaaagtggatggggtgaattaccggcaggcggtgggctatcgcctgagctgtaacggcagagtgagcgattacctgaagttacagattcaggggaatgcggtgactatcaatggcgagtcggtattgcaaaccgatgtcgatggattgggtatccgtctgcaaaccgccacggatggcgcgctgatttcacccggcaatacgcaatggttgtcatttcaatacagcggcggcagcggtccggccattgaggcgattcccgtcaaaaataatggcgtaacgttaacaggtggcgcgtttaacgcaggcgccacgttggtggtggattaccaatgaaaaaaatagttttgacgatgttaatggggggcagccttgccgcacaggcagccgataatcttaagtttcacggcacattaatttcaccgccgaattgtacgattaacaatgatcagacgatcgacgttaagttcggtaacctgctgattaataaaatagatggtacgcgttatgcgcagaatgttccgtatgagatcacctgtgattcaacggtgcgcgatgagacgatggcgatgaccctgacgctaagcggttccgtgagtgattttaatccggcggcggtaaacaccagcgtggcggggctggggattgaactcaggcagaacgaccaaccctttacgttggggtccaccattacggtgaatgaacaatcgatacctgttctgaaagccataccggttaaaaagagcggtgcttcgctgaaagaaggcggcttcgatgcgacggcaacattacaggtggattatcagtaatggctaaaagacaggcgttattacacggcgcggcctgcatcctctgtggggcgctgatattgccggtctcagcggcagataacctgcatttttccggtagcctggtggccagtccttgcacgctcacgatgcaggggacggggattgccgaagtcgatttttcgtcgcttgacagttctgatttcactcccgacggccagtctgctcgtaagcctttggtgtttgaactcacggattgcgattcggcgctgagtaacggggtgcaggtgactttcactggaaccgaagcgaccggaatgcgcggtatcctggccatcgatagctattcaggcgcttccgggatcgggattggtattgaaacgctatccggcgttcccgtgggcatgaacgataaagagggtgcgatatttacgctggtgacggggaaaaatacgctaaacctgaatgcctgggtacaacgtcttcccggcgaggacctgattccgggaaggttctctgcaagtgcgctagccacatttgagtatttataatgaaaataatacggactttatttttgctgctgattgccgtttatggcagttcggtagtggccaaacccatgctgaaagcgacgttttcaagcaccacgatgtattatggtattggccctaatagcgacaaatctattgtggcggaggtgacgatagcgactccggagggagtgtactatggctcctggaacctttcgggacatcgtaaaggagaaacgctaaccgcagactcctggtctgggccagaacctgcgccgaaggttgtattgaaggattttgataacactgtttcgcgatctgcgtgcaagaatcttccctcgaactggagggggtgtggttcttttaccctggagattacggtacaaagcgatgattatggttgcccctggctggcgtcgagccatatcgttgctaccacttttatcactaacgaaacgtattccccgccggatacgcgcagttcagtttgcccgaaagttcccgttgatacttttgatatctcctgggatgcgaacgtttcgaaacagaaaacaaccctcatgcttgatgccaccggtggcacggtgaatcgcacgttacatacctatttgatggaggggggaaaactgtgcgatggcagcaaatttgacaaccgtggcgcttattgccgttttgtctcatcgggtattacgctcaatgtgctgggctgcgaccagtcgagcgtcacgaccagcgccgttgatcatccgataaccgatgttgagcttcatgacattaatgtagcggtgaacacccgcaacattggctccgggcagttcacgtcgacctgtagcttccagtatattattgatgagctttaggggggctgggtgtttggcgaagattcacgctaacctggtatgaaccaaaaaaaaaccgggtggcggcttcgccttacccggcctacgttgtttctggacgttctcttttacagtttcgcaaacacccgacgcgcggcgtcaatagtattattaatgtcgtccatgctgtgtgcgaccgacataaagcccgcctcaaacgccgatggcgccagatatacgccttcctccagcatcaggtggaagaaacgcttaaagcgttccacgtcgcacgccatcacgtcctgatagcaggttacgctctcagcgtcggtgaagaaaatcccgaacatgccgccgacatggttgacgaccagtgggatccccgcctcctgcgccgcttcgcacagcccttccgccaggcgggtggtgagctcatccagcgtttcatgaatgccgggctgggcgacttcattcaggcaggcgaaaccggccgccatcgcaatcgggttgccggaaagggtgcccgcctggtaaaccgggcccgtcggcgccagcgcatccattacatcgcgacgaccgccaaacgcgcctaccggcatcccgccgccgatgattttacccagacaggtcaggtccggcacgacgccgtagtaatcctgggctccggccagcgctacgcgaaaaccggtcattacttcgtcgataatcagcagcgcgccgaactcatcgcacaaggcgcgcagacctggcagaaattccggcagcggcgggacgcagttcatattgcccgccacgggttcgacgatgatactggcgatttcctgcggatattgttcaaatgccgcgcgcactgacgtcagatcgttataagtgcaggtcagcgtatgtttcgcgaaatctgccggcacgcccggcgagttcggctgaccgagcgtcagcgcgccagaaccggctttgaccagcagacagtctgcgtggccgtggtagcagccttcgaatttgataatcttatcgcggccagtaaaaccacgcgccaggcgaatagcgctcatcgtcgcttcggtgccggagttcaccatgcgcaccatgtccatggtcggcaccaggttggtgaccagttccgccattttcacttccatttcggttggcgcgccgaagcttaaaccgcgctccgcagcttcgatcaccgcattgcggatagccggatggttatgccccagtaccattggtccccaggaaccgacatagtcgatatacgctttgccatcgacatcataaagataagcgccgtccgctttttcgataaacagcggggtgccgcccacgccagtgaaggcgcgaacaggggagttcacgccgccggggatcagctcgcgggccgcgctatagagattttcagacttactcatggaaagattcctggttcgtagaaaaagtgaatacccgctattctaagttattcagagaaggttatgaaagttttacgcatttgaaacaatacgatttgcaggggattttcgcggcgttggcgagtagaatgccgactttagatttgtattaccaattaatgatcttctgatgaaaacagacacttccacctttttagctcagcaaattgtgcgtttacggcgcagagatcagattcgccggttaatgcagcgggataaaacgccgctggccatcctgttcatggcggccgttgtcggcacgcttaccggactggttggcgtcgcctttgaaaaggcggtttcctgggtacaaaacatgcgcattggcgcgctggttcaggtcgcggaccatgcgtttttgctttggccgctggcctttatcctttcggcgttactggcgatggtcggctactttttggtgcgaaaatttgcgccggaagccggcggctcgggtatcccggaaattgaaggtgcgctggaggagttacgtccggtgcgctggtggcgcgtgttgccggtgaagtttatcggcgggatgggaacgttgggcgcaggaatggtattagggcgcgaagggccaacggtgcaaatcgggggcaacctggggcgcatggtgctggatgtttttcgtatgcgcagcgccgaagcgcggcatacgttgctggcgaccggcgcggcggcggggctctctgcggcgtttaacgcgccgctggcgggtatcctgtttattattgaagagatgcgcccgcagtttcgctacaacctgatttcgattaaagcggtgtttaccggcgtcatcatgtcgagcattgtgttccgcatatttaacggcgaagcgccgattattgaagtcggcaaactgtctgatgcgccggttaacacgctgtggttataccttatcctcggtattatttttggctgcgtcgggccggtatttaattcgctggtgctgcgtacccaggatatgtttcagcgctttcatggcggcgaaattaaaaaatgggtgcttatgggcggcgcgatcggcggcctgtgcggtattctggggttgattgagccggccgcggcaggcggcggatttaaccttattcctatcgccgcggcaggtaattttagcgtcgggctactgctgttcatctttattacccgggttgtcacgacgctgctttgcttttcttccggcgcgccggggggcattttcgccccgatgctggcgctgggaacgctgcttggtacggccttcggtatggcggcggcagtgcttttcccgcagtatcacctggaggccggtacctttgcgattgccgggatgggggcgctgatggcggcgtcggtgcgcgccccgttgacagggattgtgctggtgctggagatgaccgataactatcagctcattttgccaatgattatcacctgtcttggcgcgacactattagcccagtttttgggcgggaaaccgttatactcaaccatcctggcgcgcactctggcgaagcaggatgcggaacaggcggagaaaaaccagaatgcgcctgcggacgagaatacttgaacgaattaccagggtattagataatgactgccaatattgggtgaaaatttatccaattaccgatgtcgtttggagcaaaatatgagtgatgacgtagcgctgccgctgcagtttaccgacgcagcagcgaataaagtaaaaagtcttatcgctgacgaagataacccgaatctgaaactgcgcgtgtatatcaccggcggtggttgcagcggcttccagtatggttttacctttgacgatcaggtgaacgaaggggatatgaccatcgaaaaacagggcgttggcctggtggttgacccgatgagtttgcagtatctggtgggtggttcggtagattataccgaaggtctggaaggttcccgcttcattgtaaccaacccgaatgcgaaaagtacctgcgggtgtggctcttccttcagcatttgattgctgttcgttgtgccggatggcgacgcgagcgtcttatccggcctacaggaaagatgttccaggcccgataagcgtagcgccatcgggcaaaacaatatcaacgtccgttttcatccagggcaaacgtcggcaatttcaaatgccagcgaatggccgccagccgaatgaacagcgtgaccaccatacccatcatgctggcgctttccagcggtactgaaaacgtataaaacgcggtggcgtgaacaatcccgccgataatacaggccgtggcatagatttcggtgcgtaggatcatggggatctcgcgtgccagaacatcgcgaataatcccgccgccgacgccggtaatcacgcccatacagacagccactaatggccccgtttcagcgaggaaggctttattcaccccaatgccgacaaacaccgccagcccgaccgcatccagtaccggcaacatccatttcggtagacgtcttggctggcgaaccagtaggatggtcagcatactggtgaccatggcgacgaccaggtcggtaggatctttaacccagaataccgggccgttatccagcgccatatcgcggattgtcccgccgccgacggcagtaacgacgccgagcaccaggacgccgaacgggtccatacgtaatttcccggccagcaacacgccagagatagcaaatacagccgtgcctacaatatccagccaatagacgagcattgtcgaatccccactgggagcctggtaagacaggctctaattcacctgtgaaagcgcattacagagttgttttgcggcgaggataatacgcgggcttgcgcgttcaaaccagtcgctgttaagcggaataaccggaatttttaacaggtttccccagtattgttcaattttgagaatttcgcccgcttttccggccacgataatggcctggggatgccttgccagcacctgctcacggctgacttgcggccacggcacgcggctgtcagcaaagacgttttctccgccgcaggtcgtcaaaacctgatgttgaatagaccctttaccactggtaaacagaggattcatgccaaactgaagaaagacgcgctttttagctttaccggcatactcggcgttgagcgcggcgtactcgtttagcaatgtctgcgctgcctgctgagccttttccggctgcgggctccaggcggccagttgacggagcgtgtcggcgatctgttcgatggttaccgcgtccacccacatgaccttaatacctaatgacgtcagttggtttacctggcgttccgcattaccgccgcgccaggcgacgaccagatccggcttcagcgccacaatgcgttccagattcattccctgccaggtagagacttgttctattttttgcgcttcgggcgggtagtcggaatagctgctgacgccaacgggcgtaatcccggcggcaaaagcgagctccgtattggcgggagagagggtaatgacgcgcggcgcagcgtaaagccacaccgggagcgtaagcagcagggcgaccagcgccctgaacatttgcttagccatgcgccagtttctgtaccagcgtttcgaccatcagagtcgactgtttcgccgccaccgcgaggaattcgtcaaagctgaggtgcgattgctgatcggccacgtcagaaatagcgcgaaccaccacgaacggcacgttgaagttatggcagacgtgggcgatagcggtggcttccatctctacggcgaccgcgtcggggaagttatgccggattttcgccagcccgacggaaccgttaataaacgcgtcgccgctaacaataaggccgcgtaccgcgttcagattcagctctctgatgcaggattccgcggcggcgatcagtttgtcatcggccttaaatccggccggacagcccggtaattgcccgtattcatagccgaaagcggtcacatcagcgtcgtggtaacgcgcttcgtcagagacgacgatatcgccgaccttcagcgtggacgccagaccgcctgcggaaccggtattgatgatcacgtccggcttgcagtgctccagaagcaacgttgcgcccagcgccgccgcgactttaccgataccggatttcagcaacgccacttcggtgccgttcaactggccagtgtaaatttcgcagccgcccagcgtaatcgtctgacggttgtcaattttgtcacgcagcagcgtaacttcttcttccattgcgccaatgatgccgattttcatagatttactcgcgataagtcagttttgggggcatagtttatcatgcgcttatggggaagcgcatttctcaggcggggagaggatatggcatcgatcgatttccgaaataaaattaactggcatcgtcgttatcgttcaccgcagggtgtaaagacggagcatgagatcctgcggatttttgaaagcgatcgcgggcggattatcaactctccggctatacgccgtttgcagcaaaaaacgcaggttttcccgctggagcgcaatgccgcggtgcgtactcgcctgacgcattcgatggaggtgcagcaggtagggcgttatatcgcgaaagagattttaagccgtctgaaagagcaagaccgactggaggagtacggcctggacgcgctgaccggtccctttgaaagtattgtggaaatggcctgcctgatgcacgacatcggtaatccgccgttcggtcattttggcgaggcggcgatcaatgactggtttcgtcagcggctgcatccggaagatgcggaaagtcagccgctcacgcatgatcgctgtgtggtttcctcgctacggttacaggaaggcgaagaaaatctgaacgatattcgccgcaaggtacgtcaggatatctgccattttgaaggcaatgcacagggaattcgtctggtacatacgctcatgcggatgaatcttacctgggcgcaggtcggcggaattttaaaatatacccgtccggcatggtggcgagggccggtgccggattcccatcgctatttaatgaagaaaccgggctattatctttctgaagagaagtatattgcgaggttacgtaaagaactgcagttagcgccttacagtcgctttccattaacgtggattatggaagccgcagatgatatttcttattgtgtcgccgatcttgaagacgcggtagagaaaagaatctttagcgttgagcagctttatcaccatttatatcacgcgtggtgccaccatgagaaggattcgctgtttgagctggtggtaggaaatgcgtgggaaaaatcacgcgccaatacattaagccgcagtaccgaagatcagttttttatgtatttacgcgtaaatacattaaataaactggtgccctatgccgctcagcgttttattgataatttgccgcagatttttgccggtaccttcaatcaggcgttactggaagatgccagcggttttagccgcctgcttgaactctataagaatgtggcggttgagcatgtgtttagccatccggatgtagaacagcttgaactacagggataccgggtgatcagcgggttattagatatctatcagccgctattaagcttgtcgcttaacgactttcgcgagctggtggaaaaagaacggttgaaacgcttccccatagaatcgcgcttatttcagaaactttctacgcgccatcgtttggcctacgtggaagtcgtcagtaaattacccacggattcggcggagtacccggtactggaatattattatcgctgtcggttgattcaggattatatcagcgggatgactgacctttacgcatgggatgaatatcggcgtttgatggcggtcgaacagtaaatggacttttgtaaagatggacaataaatttttactttttccagaaactttattccggaacttcgcgttataaaatgaatctgacgtacacagcaattttgcgttacctgttaatcgagattgaaacacatgaaaaaaaccacattagcaatgagtgcactggctctgagtttaggtttggcattgtcgcctctgtctgccacggcggctgaaacgtcctcttcagcaatgactgcccagcagatgccaagcctggcaccgatgctcgaaaaagtgatgccatcggtggtcagtattaatgttgaaggtagcaccacggtgaatacgccgcgtatgccgcgtaatttccagcagttctttggcgatgactccccgttctgccaggacggttctccgttccagaattctccgttctgccagggcggcggtaacggcggcaacggcggtcaacaacagaaattcatggcgctgggctccggcgtaattattgacgccgcgaagggctacgtcgtcaccaacaaccacgtggttgataacgccagcgtgattaaagtacagcttagcgatgggcgtaaattcgatgctaaagtggtgggcaaagatccgcgttctgatatcgcgctgattcaaattcagaatccgaagaacctgacggcgattaagctggcggactccgacgcgctgcgcgtgggggattataccgtcgctattggtaacccgtttggtctgggcgaaacggtgacgtcaggtatcgtttcggcgctggggcgtagcggcctgaacgtagaaaattacgagaactttattcagaccgacgccgcgattaaccgtggtaactccggcggcgcgctggtgaacctgaacggtgagctgatcggtattaacaccgcgattctggcgccggacggcggcaacatcggtatcggcttcgctatccccagtaacatggtgaaaaacctgacgtcgcagatggtggaatacggccaggtgaaacgcggcgaactggggatcatggggactgagctgaattccgaattggcgaaagcgatgaaagtcgacgcccagcgaggcgcgttcgtcagccaggtgatgccgaattcgtccgcggcgaaagcgggtatcaaagccggggatgtcattacctcgctgaacggtaaaccgatcagcagctttgcggcgctgcgcgctcaggtcggcactatgccggtcggcagcaaaatcagcctcggtctgctgcgtgaaggtaaagcgattacggtgaatctggaactgcagcagagcagccagagtcaggttgattccagcaccatcttcagcgggattgaaggcgctgaaatgagcaataaaggccaggataaaggcgttgtggtgagcagcgtgaaagcgaactcacccgccgcgcaaattggcctcaaaaaaggcgatgtgattatcggcgctaaccagcagccggtgaaaaatatcgccgagctgcgtaagattctcgacagcaagccgtcggttctggcgctgaatattcagcgtggtgatagttctatttatttgctgatgcagtaatcacctttgtcccccttccgccatggaagggggcaacacttttctgtgaaaccccccacaactccatacttatttgcaccgttttgtgcatttgcacaatgtcgagacctgtcatcttccttatgcttgtgctctgctcacaggagggatttatggctggctggcatcttgataccaaaatggcgcaggatatcgtggcgcgcactatgcgcatcatcgataccaatatcaacgtaatggatgcccgcgggcgcattatcggcagcggcgatcgggaacgtattggtgaattgcacgaaggcgcgctgttagtgctgtcgcagggccgggttgtggatatcgacgacgccgtggcgcgacacctgcacggggtgcgtcaggggattaatcttcccttacgtcttgagggcgaaattgtcggcgtgatcggcctcaccggcgaaccagagcacctgcgtaaatatggcgaactggtgtgtatgactgccgaaatgatgctggagcagtcgcggttaatgcaccttttggcgcaggatagccgtttgcgcgaagagttggtgatgaacctgattcaggccgaagaaaatacgccggcgctggtggaatgggcgcagcgtttggggatcgatttgaaccagccgcgtgtggcggcggtggtggaagtcgacagcggccagcttggcgtcgatagcgcaatggcggaacttcagcagttgcagaatgcgcttaccacgccggagcgtaacaacctgatagccattgtttctctcaccgagatggtggtactcaaacccgccttaaactcgtttggtcgttgggatgctgaagatcatcgtaagcgcgtagagcagcttatctcgcgcatgaaagagaatggtcagctacgttttcgcgtggcgctgggcaattactttaccgggccgggcagtattgcacgctcataccgcacggcgcgcaccacgatgatggtcggcaaacagcgaatgccagagagccgcagctatttttatcaggatttgatgctgccggtcctgttagatagcctgcgtggcggctggcaggccaatgagctggcgcgcccgctggtaaaactcaaagcgatggataacaacgggttattacgtcggacgctgacggcgtggtttcgccataatgtccagccgctggcgacctctaaggcgctgtttattcatcgtaacacgctggaatatcggctaaatcgtatttcggaactgaccgggctggatttgggaaattttgacgatcggctgttgctgtatgtggcgctacaactggatgaacagcgttaagcccggcggcgctacgcttatcaggcctacggggatatatctgtaggccggataaggcgtaacacgtcgccatccggcaacacacagcttacttacgggtaagcttgtccagatcggcttcgatttcactgatcttattcgcgacgacgctttccaggtggcgcaagtcgtcgaggatcttacgtttgagatcgagttctgagcggtcgcgctggcagatttggtccagctcgtcaatcacatagcgtaggttagggctaatctcctgtacctctttataaccctgaccgatgccatcggccaccaccgttttacgctggcgtggatacttaaacttcacgcttttagcaaagaattcacctctatccttttgaaaatagattttcaggatatcgttattggcttcttgccgcaggctgtaacgatcgatttcctcaggattggtaatgcccagactttttagattgtcatacatagcggtatccttcatcacactataacttttgaataattaacgaaaaattggtttttcgccaccagtgtatacaaaaaaagcgcggttgatcgcagaagacgtctcggcaacgtcatgagcaaaagggcggcggttattgatagcttaagtaattcaacgcgatattccgtttatagagaaagcgtttgaagtcagtgtgggaaattgaccggaggcagtggtcgataaccttgagaggcggagtctatgtccggaacgtataatgctactattcgccgggtggtggtttccgcctggataggaaactccattgaatattatgattttctattatacggcctggcaagcgcgctggtatttggcccgcttttttttcctggcgccagcccattgactgcaacgttatcttcttttgccagtttcggcgtgggatttatctcccgaccgctgggcgcgctattttttggcaacaggggagatacgcttgggcgtaaaaacacgttattaattacgttaggggggatgggcgcggtcacgtttctcatcggttgcctgccttcttacgccagtattggcgcgctggcgcctgctttactggttattctgcgttttctacagggatttatggttggaggcgaatggggaggcgccatgttgatggtcgtggaatatgctgctggaaagcaccgggggcggttaagcgcgctatcgcaaacaggaggactcacgggacaattattggcgacaggcgtatttatagtcgtgacccaattaccgcaggaggcgttgttatcgtggggatggcgtattccttttctgctcagtgcgcttttggtgttgcctggattatatatgcgtcatcgtctggatgagacgcctgtcttccgtgcgtttaaaaagcagcaggccattaatcataggcagcaaagagaagaaaggccggtggtcaaagtagtacgagaacaatggcgcagcattttgctgattataattctgcgttttgcggaaagcgttcccttttttcttgctaccgtcttcgcggtttcctgggcgacgacgcagcttgggattgccagcctgactattctgtacattgtaatgttcacctgtctgctggcgtatcccatgcacgtgctatttggcatcatgtcggatcggcgtggctgccgtcaggtgtatattttcggcgcgctttttgtcgcggcaatggcttttccctttttctggctgctggaaagccgttcgctcatactgatgacaatgggctacgttctgcttattaacattggtcataattcactgaatgccgtgcaaccttcttttttcgccggactgtttcatccgcctgtacgctacagcggttcatcaattggcgctcagttgggggcggttgtggcagggggattcacgccgtttatcgctaaagcgttaagcgcagtctatgataacagttgggcgttggttgccggttatgtcgttttgactgcgttggcttcggcgtttgcggcaaagattgcgccggaaaccgtgttaccgcattcgccgtaatgcaaaggggggctgtcgcccccgcttttcactcgcttaatcaatagtgcgcaataattcgttaatgcccactttaccacgcgttttggcgtcgacttttttcacgatcaccgcgcagtacaggctgtacttaccgtcttttgacggcaggttgccggaaacgaccacggagcccgccggtacgcggccatagtgaacttcaccggtttcgcgatcgtagattttggtactctggccgaggtatacgcccatggaaatgacggaaccttcttcgacaatgacgccttccacgacctcagaacgcgcgccaataaagcagttgtcttcaatgatggttgggttagcctgcagcggctccagtacgccgccgatacccacgccgccggaaaggtgaacatttttaccaatctgcgcgcaggaacccaccgtcgcccaggtgtcaaccatggtgccttcgtcaacgtaggcgccgatgttaacgtaagacggcatcagcacggtgttgcgggcgataaatgcgccctgacgaacggccgcaggcggaacgacgcggaagccttctttctgaaaacgcgcttcgtcgtaatcagcgaatttcatcgggactttatcgaagtagcggctttccgcaccgtcgataacctggttatcgttaatacggaaagagagcagaaccgctttcttcaaccactggtgagtgacccactgaccgtcgattttttctgcgacacgcagcgcgccggaatcaagtagagaaatgacctggtttactgcctctcgggtcacggtatctacattagccggcgtaatatcggcgcggcgctcaaaagcggtctcaataacgttctgtaactgctgcattgttaaactctttcatataaataaacacactaccctttatcgtttggattgagggccgctgtcaaccgttgttgcacctcaagttgcagcacattattaagtgcgcgccgatccgctgtggcgattatgaataaatcttctactcgttcaccaatggttgtaattcgggcgccatgaagcgaaattcccagatcggcaaaaatttgtccgaccctggccagcagaccaggttgatcgagcgcgatcaattccatgaatgattttctgtcggtatgggtgggcagaaaattgacttccgtttcgaccgtaaagtgccgtaactttgccggttgccgacgcggctgcggcggctgccagctacgctgcgtaatggtttgttcaagaccggtgcgaataacgtcatggcgatccgccgccagcgggctgccgtctggttccagaacaataaacgtatccattgccatgccgtcgcgagtggtaaagatctgcgcgtcatggacgcttaaattacgcctgtccagctcggcgcagacggcggcaaacagatagggtctgtccggactccagataaaaatttcggttccaccgcgcgtggcctgcggactgagcaacactaacggttggcgcagatcgtgctgcaataaatggcgtgcgtgccaggcgagctgatttggactatgacgaacaaaatagttagcgcgacagcgggtccagattttgtgcagcgcggcttcatcaatattgtccattcgcagcagcgccagcgcctgaagctgatggtgacgcacgcgctcacgcatatccggcgtattttgcattccacgcctgagctgtttttcagtggcgaagtacagctcgcgcagcaggctctgtttccagctattccacaaggtttcgttggtcgcgcagatgtccgcgacggtcaggcagaccagaaaacgcagccgtgtttcggtttgcacctcttcggcaaactgcttgatgacttccggatcctggatgtcgcggcgctgggcggtgactgacattagcaggtgttggcgcaccagccacgcgaccagttgcgtttcgcgtgagttcaaaccgtgcagttcggcgaaggtgagtacatcctgcgcgcccagtacggaatggtcgccgccgcgtcctttcgcaatatcgtggaacagcgcggcgatcaggatcagttccggatggggaagccgcggccagagatcgacgcatagcggatggcgctggcgcgtctcttctttcgcaaagctctccagtttgagcattacgcggatggtgtgttcatccaccgtgtatgcgtggaacaggtcaaactgcatttgtccgacgatgtgcgaccactgcggcatataagcccacagtacgctgtggcgatgcatgggcagcaggccgcggctgaccgcgccgggatggcgcagcatactcagaaacagagtgcgcgcctccgggatgtaacacagcggttggctcaggtggcggcgggcgtggcgcaagtggcgtaacgtcgtagagtagatgccggtgatcgcgctattgcgcaccatcatataaaacatgcgcaggatcgcttgcggttcgcggataaacagcgtgtcgtcacgcagatcaataagcgtgccgcgcagttgaaactcatcgtcaacaggacgtggtttttcatccgcaggtagcgccagaatcgcctcgtcaaatagctgaagcagcatctgattaagttcgctcacccgacgcgtaacccggaagtagtctttcatcatccgctcaaccggatcattgccctcgccgctgtagttaaggcgttgagcgacgcttaactggcggtcgaacagcaggcggttatcgtagcggctgaccaccagatgtagcgcaaagcgaatgcgccacaggatatgcaggcactcgttgagctccgcgcgctcagcgggggttaaaaagccgaatcccaccatctcatcgagcgaggtagcgccgaagtgacgtcgggcgacccactgtaacgtatggatatcgcgcaggccgccggggctgcttttaatatccggctccagattatagctggtaccgtgatagcgctggtggcgctggttctgctcttctactttggcggcgtaaaatttgtcggacggccaaaaaccttcgctgaaaatatgtttttgcagtgccagaaacagagcgacatcaccgatcagcaggcgcgtttcgatgaggtttgtcgcaacggttaaatcagacagaccttccagcagacactcttccagcgtacgtacgctatgcccgacatccagcttgacgtcccataataaagtcagcagctcgccgaccttttgcgcctgttcatcgggcagctttttgcggcttaaaatgagcagatcaatatcggaaagcggatgcagttcgccgcgtccatagccgccgacagcgaccagcgccagatcggcaatctgaccgaaaccggcctcaatccacaggcgttgcaataactggtcgataaattcggttcgggcttcaataagctgttcagcacaaatgccgctgtcaaatgcctctcccagccagtgttgaaagatgtcgatgcgggctttgataccggcgacggtcagttcagcgcgcggccagacgccagggttttgcggctggtcagggagggtggggagtgcggtattcgcgtgctgttcaggaagagtattcatatgcgccacccattaaaaagccggataatggcgtgaacgccttatccggcctacgtatttatcttcatccttcaagttgcttctacgttggctgcgctcgttcactccagtcacgtacttatgtacgctcctgaagattcactctcttgccgccttgaggcaactcgaatgattttgagtaaaggtgtaatttgtaggcctgataagatgcgaaggcatcgccatcaggcaaaacattattcgtcgtgtgtgatgatcgccgggatggtgtcatctttacgcagcgtcagaatttcacagccgttttccgttaccacaatagtatgctcgtactgagcagacaagctgcgatctttggttttcaccgtccagccgtctttcatggtgcggatacggtaatccccggcgttcagcatcggttcaatggtaaaggtcatgccaggctgcaacacgacgccgccatcgtctgcatcataatgcagcacctgcggttcttcatggaagccgcgaccaataccgtgtccgcagtattcacgtaccacggagaaaccttcgccttcggcatatttctggatggcggcgccaatggtgcgcaggcggatgcccggtttcaccattttgatgcccagatacaggctctcttgcgtgacgcggcacagacgctcgccgagaatggtcggtttgccgacgataaacatcttcgaggtatcgccgtggaattcatctttaatcacggtcacgtcgatgttgacgatatcaccatctttcagatgtttagcgtcatccggaatgccgtggcacaccacttcattaatagagatacagacggatttcggataaccgtgatagccgaggcaggcggagatcgcgtgttgttcgttaacgatgtaatcgttacagatacggtccagttcgccggtggtgacgcccggtttgatatacggttcgatcatttccagcacttcggctgccagacggcccgcgacgcgcattttttcgatgtcttcagatgtcttgatagagatagccatgaattctgtccatcagtgccgatgatttcggcaataattgtgtaagtgctgacaatggtatcagtcaggggtgtaccctgccaaattgagaatcattctgaacttcgcctttcgtgccacaggtgcgttggcgacattttttcaccccagtcactgactggccgtaagctcccggggatgcaaaaatttgctgcctgcctgtaacacgaaattcatcgttcaattcagcactgagtgccaacaattattggtgtcggtggcgtatttgtggtataaagcgcgccggacttccgatccattcgaagactacacacgatggacgggagcgacaaatctcactttgtgtaacaacacacacgtatcggcacatattccggggtgccctttggggtcggtaatatgggatacgtggaggcataaccccaacttaatctatagaggttttaaatcatggcaactgtttccatgcgcgacatgctcaaggctggtgttcactttggtcaccagacccgttactggaacccgaaaatgaagcctttcatcttcggcgcgcgtaacaaagttcacatcatcaaccttgagaaaactgtaccgatgttcaacgaagctctggctgaactgaacaagatctctgctcgtaaaggtaaaatccttttcgttggtactaaacgcgctgcaagcgaagcggtgaaagaagctgctaacagctgcgaccagttcttcgtgaaccatcgctggctgggcggtatgctgactaactggaaaacagttcgtcagtccatcaaacgtctgaaagacctggaaactcagtctcaggacggtactttcgaaaagctgaccaagaaagaagcgctgatgcgtactcgtgagcttgagaaactggaaaacagcctgggcggtatcaaagacatgggcggtctgccggacgctctgttcgttatcgatgctgaccacgagcacattgctatcaaagaagcgaacaacctgggtatcccggtatttgctatcgttgataccaactctgatccggatggcgttgacttcgttatcccgggtaacgatgacgcaatccgtgctgttagcctgtacctgggcgctgtcgctgcaaccgttcgtgaaggccgttctcaggatctggcttcccaggcggaagaaagcttcgtagaagccgagtaataaggcttgataactccctaaaatagttcgagttgcaggaaggcggcaagctcgagaattcccgggagcttacatcagtaagtgaccgggatgagcgagtgaaggcaacgcgcctgcggctcgaaatatgaaggggagagcccttatagaccaggtagtatcacgtttggttagggggcctgtatatggccccctttttcacttttatatctgtgcggtttgatgccgggcagatcaaatctttcgaggattttagaatggctgaaattaccgcatccctggtaaaagagctgcgtgagcgtaccggcgcaggcatgatggattgcaaaaaagcgctgactgaagcgaatggcgacattgagctggcaatcgaaaacatgcgtaagtccggcgctatcaaagcggcgaaaaaagcaggcaacgtggctgctgacggcgtaatcaaaaccaaaatcgacggcaacgtcgctttcattctggaagttaactgccagactgacttcgtggctaaagatgctggcttccaggcatttgctgacaaagtgctggacgccgctgttgctggcaaaatcactgacgtagaagttctgaaagcacagttcgaagaagagcgcgttgctctggtagcgaaaattggcgagaacatcaacattcgtcgcgtcgcttccctggaaggcgacgttctgggttcttaccagcacggtgcgcgcatcggcgttctggttgccgctaaaggcgctgacgaagagctggttaaacagctggcgatgcacgttgcggcaagcaagccggaattcgttaagccggaagacgtgtctgctgacgtggtagagaaagagtaccaggtacagctggacatcgcgatgcagtccggtaagccgaaagaaatcgcagagaaaatggttgaaggccgcatgaagaaattcaccggcgaagtttctctgactggtcagcctttcgtcatggaaccgagcaaatctgttggccaactgctgaaagagcacaacgctgacgtgactggcttcatccgctttgaagtgggcgaaggcattgagaaagtcgagactgactttgcagcagaagttgctgcgatgtctaagcagtcctgattttcctgaggagccgcctgagggcggcttctttttgcgcctctcttgtaaaatcagccgacgcctggcgtctgcgctgaaatgcgacgtacaatgtcgccggaattaactcatatcaatcgttgacagtctcaggaaagaaacatggctaccaatgcaaaacccgtctataaacgcattctgcttaaattaagcggcgaagctctgcagggtacggaaggcttcggtattgatgcaagcatactggatcgtatggctcaggagatcaaagaactggttgaactgggtattcaggttggtgtggtgattggcggtggtaacctgttccgtggcgcgggtctggcaaaagcggggatgaaccgcgttgtgggcgaccacatgggcatgttggccaccgtcatgaacggcctggcaatgcgtgatgcgcttcaccgcgcctatgtgaacgcccgcctgatgtcggcaattcctttaaacggcgtgtgcgacaactacagttgggccgaggcgattagcctgctgcgtaataaccgtgttgtgattctgtctgcaggtacgggtaacccgttcttcactaccgactctgcggcttgtctgcgcgggatcgaaattgaagcggatgtcgtactgaaagcgaccaaagtggatggcgtattcactgccgatccggcaaaagatccttccgcgaccatgtacgatcagctgacctacagcgaagtgctggataaagagctgaaagtgatggatctggcggcgttcacgctggctcgtgaccacaaactgccgattcgtgttttcaacatgaacaaaccgggcgcgctgcgtcgtgtggtgatgggcgaaaaagaagggacgttaatcacggaataattcccgtgagcgccaaatacgggtaagattctgttctattgacgggtcttattacctggcagaaattaaacgagactatacttagcacatctttatattgtgtgaccgtctggtctgactgagactagttttcaaggattcgtaacgtgattagcgatatcagaaaagatgctgaagtacgcatggaaaaatgcgttgaagcgttcaaaacccaaatcagcaaagtgcgcacgggtcgtgcttctcccagcctgctggatggtattgtcgtagaatactatggcactccgaccccgctgcgccagttggcaagcgtaacggtagaagactcccgtaccttaaaaattaacgtgtttgaccgttctatggggccagccgttgaaaaagcgatcatggcgtcagacctcggtttgaatccaagctctgcgggcaccgacattcgcgttccgctgccgccgctgaccgaagaacgtcgtaaagatctgacgaaaattgtccgtggcgaagcggagcaggcgcgtgtcgccgttcgtaacgtccgtcgtgatgcgaacgataaagtaaaagctctgctgaaagataaagcgatcagtgaagatgacgatcgtcgctctcaggaagaagtacagaaaatgaccgacgcggcaattaagaaagttgatgcggcgttggcagataaagaagcagaactgatgcagttctgattgatctgtacgcagatataaactcattccaccgctaacctggcggatgagtggtgtacaaagcgccgcgcagaagacattatcaggtctcctgtgcggcgttttgctttttattccgtttcaacacttctggacgtttcatgaagcaattaaccattctgggctcgaccggctctattggttgcagcacactggacgtggtgcgccataatcctgatagcttccgcgttatcgcgctggtggcgggtaaaaatgtcgcccgcatggcggagcagtgcctggagttctcgccgcgttatgccgtgatggacgatacgtcgagcgcagaacagctcaaaataatgcttcagcagcatggcagccgcaccgaggttctgagcggtcagcaggctgcctgtgagatggcggcgcttgatgaggtcgggcatgtgatggcggccattgtgggcgcggctggtttactgccgaccctggcggcgattcgcgcagggaagacgattctgctggcgaataaagaatcgctggtgacctgcgggcggctgtttatggacgaagtaaaacgcagcaacgcccggcttttacccgtcgatagcgaacataacgcgatttttcagagtttgccgcaatctattcagcataatctgggatacgctgaccttgagcaaaatggcgtaacgtcgattttgcttaccgggtctggtggcccgtttcgtgaaacgcccatgtgcgatctggcagcgatgacgccggatcaggcatgtcgtcatccgaactggtcgatggggcgaaaaatctccgtcgactccgccaccatgatgaataaaggtctggaatacattgaagcgcgttggttatttaatgccagcgcacgtcagatggaagtgttgatccatccgcaatcggtcattcattcgatggtgcgttatcaggacggcagcgtcctggcgcagcttggagaacctgacatgcgtacgcctattgcgcatacgatggcatggccgaatcgcgtcacgtccggcgcgcagccgctcgatttttgcaaactcagcgcgctgacgtttagcgcgccagattatcagcgttatccttgcctgaagctggcgatggaggcgtttgagcaaggtcaggcggcaacgacggcgctcaatgcggcaaacgaaatcaccgttgccgcgtttctggcgcaacagattcgttttaccgatatcgccgggctcaatttagcggtgctggagaggatggatttacaggaaccggcaagcgttgaggacgtattgcaggttgacgccatcgcgcgtgaagtagccagaaaacaagtgatacggctctcacgctgacgattatcccgcgacagaagatcgtgctatttgttagcgttgggcttcggtgatatagtctgcgccacctgatcgcaggtttttggcttttttcggtcaggttagccgtggttttacacggcttttttgtggatacacaaaatcattcaggacgcatcgggacggcaggcgagtacgttcccggcgtgcgcagacagcgcacgacaggggcgatgacgcgcggtcatccgcgaagcgaaccgaagagaatgtgtataaaggcttcagtattcctgagtaccgctaaatcctttcagggacaaaaaacgcgttatgttgtctgcaactcaaccagtaagcgaaaatttgccagcgcatggctgccgtcatgttgcaataattatggatggcaatggtcgctgggcgaaaaagcaagggaagatccgggcctttgggcataaagccggggcgaagtccgtccggcgagcggtctcttttgctgccaataacggtattgatgcgttaacgctgtatgcctttagtagtgaaaactggaaccgaccggcgcaggaagtgagcgcgttaatggagctgtttgtgtgggcgctggatagcgaagtcaaaagcctgcaccgccataacgttcgcctgcgtattatcggcgatatcagtcgattcaactcacgtttacaagaacgtattcgcaaatcagaagcgcttaccgcccataatacgggtctaacgctgaatatcgctgcgaattacggcggacgttgggatattgtccagggagtccgacaactggcggaacaggtgcaggctggagtgctgcgccccgatcagattgatgaagagagactaggccagcaaatctgtatgcatgagctggcgcctgtggatttagtaattaggactgggggagagcatcgcattagtaactttttgctttggcaaattgcctatgccgaactttactttacggatgttctttggcccgatttcgatgaacaagactttgaaggtgcgctgcatgcctttgctaatcgagagcgtcgtttcggcggtaccgagcctggtgatgacaaagcctgatgggggttgcttttgctgaagtatcgcctgatttctgcttttgtgttaatacccgcggtcatcgctgcgctttttttattgccgccggtggggttcgccattattacgctggttgtctgtatgctggccgcgtgggaatggggacagttaagcggtttcgccgcgcgttcacagcgggtttggctggcggtgctgtgtggtctgttattggcgctgatgctatttttgttgcctgagtatcatcacaacattcgtcaaccgctggttgagatgtcgctttgggcatcgttaggatggtgggttgtcgcgctactgctggtgctattttatcccggttcggcggcaatctggcgcaactcaaaaacattgcgtctcattttcggtttgttaactattgtgccatttttctggggcatgctggcgctgcgcgcctggcactatgacgagaatcattacagtggcgcaatatggctactctatgtcatgatcctggtctggggagcggactctggcgcgtatatgtttggtaaattatttggcaaacataagctggcgccgaaggtttccccgggtaaaacctggcaagggtttatcggcgggcttgctacggctgccgtgatctcatggggctacggtatgtgggcgaatctgaatgttgcgcctgttatcttgctgatttgctctgtggtggcggctctggcttctgtactgggcgacctcaccgagagtatgtttaagcgcgaagcaggaattaaggatagcggccacttgattccaggccatggcggcattctggaccgaattgacagtctgacggctgccgtaccggtctttgcttgcctgttgttactggtgttcaggacgctctaacggaaggttttatgctgagtattctctggaatctggctgcattcatcatcgcactgggcgtgctgatcactgtgcatgaatttggtcatttctgggttgcccggcgctgcggtgtgcgagttgagcgcttttccatcggttttggcaaagcgctctggcgtcgtaccgatcggtacggcaccgagtatgtcatcgccctgatcccgctgggcggctacgtcaaaatgctggatgagcgcgccgaaccggtagcgccggaattgcgtcgtcacgccttcaataacaaaacggtgggccagcgcgccgcaattattgccgcaggtccggttgcgaacttcatttttgctatctttgcttactggctggtctttatcatcggcgtccctggcgttcgtccggtcattggcgaaataacgcccaactcgattgctgcgcaggcgcaaattgcgcctggtacggaacttaaagccgttgatggtatcgaaacccctgattgggatgccgtgcgtttacaactggtgtccaaaattggcgatcagcagacgacggtgagcgtcgcgccgtttggtagcgaccagcggcaggataaaacgcttgatttacgtcactgggcatttgagcctgataagcaagatcctgtatcttctttagggattcggccccgcgggccacagattgaaccggtactgtcagaagtgcaggcgaattccgcagccagtaaagcgggtttgcaagcaggcgacaggatcgttaaagtcgatggtcagccgttaacgcagtggatgaaattcgtgacgtttgtacgcgataatcccggtaagccgttagcgttagagattgaaaggcaggggagcgccttgtcgttgacgttaacgccggatacgaaatcggttaacggaaaggcggaagggtttgcaggcgtggtgcctaaaattattcctctgccggaagagtacaagactatacgccagtatgggccttttagcgccatcctcgaagccacggataagacgtggcagttgatgaagctgacggtcagtatgctgggtaaattgataaccggtgatgtgaaactgaacaacctcagtgggccgatttctatcgctcagggggctgggatgtcagcggagttcggggtgatttattacctgatgttccttgcgctaatcagcgtgaacttagggataattaacctgtttccgctgcccgttcttgacggggggcatctgctgttcctggcgattgaaaagcttaagggcgggccggtatccgagcgggttcaagactttagttatcgcattggctcgattttgctggtgttgttaatggggcttgcacttttcaatgatttctctcggttgtaagagagttagttaggaagaacgcataataacgatggcgatgaaaaagttgctcatagcgtcgctgctgttcagcagcgccaccgtatacggtgctgaagggttcgtagtgaaggacattcatttcgaaggcctgcagcgagtcgccgttggtgcggctctcctcagtatgccggtgcgcacaggcgacacggttaatgatgaagatatcagtaacaccattcgcgctctgttcgccaccggcaactttgaggacgtccgcgtcctgcgcgatggtaatacccttctggttcaggtaaaagaacgtccgaccattgccagcatcactttctccgggaacaagtcggtgaaagatgacatgctcaagcaaaacctcgaagcgtctggcgtacgtgttggcgagtctctggatcgcaccacgttgtctgatatcgaaaaaggtctggaagacttttactatagcgtaggtaaatacagcgccagcgttaaggcggtcgtcacgccgctaccgcgcaaccgtgttgatcttaaactggtgttccaggagggcgtatcggcgaagatccaacagatcaacatcgtcggtaaccatgcctttagcaccgaagaactcatttctcatttccagttgcgtgacgaagtgccgtggtggaacgtcgtcggcgatcgtaaataccagaaacagaagctggcgggcgaccttgaaaccttgcgcagctactatctggatcgcggctacgcgcgtttcaatattgactccacgcaagtgagtctgacgccggataagaaagggatctacatcaccgtcaatatcaccgaaggcgatcagtacaagctttccggggttcaggtgagcggtaacctggccggacattccgctgaaattgagaacctgacgaaaattgaaccgggcgagctctataacggcaccaaagtgaccaaaatggaagatgacatcaaaaagcttctgggtcgctatggttacgcctatccgcgcgtgcagtcacagcctgaaattaacgatgctgacaaaaccgtaaaactgcgcgtaaacgtcgatgcgggcaaccgtttctacgtgcgtaagatccgctttgaaggcaacgacacctcaaaagattccgttctgcgccgtgaaatgcgccagatggaaggggcgtggctgggcagcgacctggttgaccaggggaaagagcgtctgaaccgtctcggcttctttgaaaccgtcgacaccgacacgcagcgcgttccgggtagcccggatcaggttgatgtggtgtacaaggtgaaagagcgcaacaccggtagctttaacttcggtatcggttacggtacagaaagcggcgttagcttccaggccggcgttcagcaggacaactggttaggtaccggttattccgtggggattaacggcaccaaaaacgactaccagacctacagcgaactgtccgttactaacccatactttaccgttgacggcgtgagcctcggtggtcgtatcttctataacgacttccaggcggacgacgcggatctatccgactataccaacaagagttacggtacggatgtgacgcttggcttccccatcaacgagtacaacacgttgcgtgctggtctgggttatgtccataacaaactgtccaacatgcagccgcagatcgcgatggatcgttatcttgagtcgatgggacaatctgctgataccagcagttttgccgctgatgacttcacctttaactacggctggacctataacaagcttgaccgtggttatttcccgacggacggttcgcgcgtcaatctgacggggaaagtgacgattccaggttccgacaacgaatactacaaagtgtcgctggataccgcgacctatgtgcctatcgataacgatcacaagtgggtggttctggggcgtactcgctggggttacggcgatggtttaggcggcaaggaaatgccgttctatgagaacttctatgccggtggttccagtaccgtgcgtggtttccagtcgaatactatcggcccgaaagcggtctataaaaatggcgcccatactagttgggacgataatgatgattacgaagactgtactcaggaatcaggctgtaaatcagatgatgcggtaggtggtaatgccatggctgtcgccagcctggaatttattaccccgacgccgttcatcagcgaaaagtatgccaactcggttcgtacctccttcttctgggatatgggtaccgtttgggatacgaactgggatccgtcatctgcgccgtcagatgtaccggattacagcgatccaggcaacatccgtatgtccgcgggtatcgcattacaatggatgtccccattggggccgttggtcttctcctacgcccagccgtttaaaaagtacgatggagacaaagccgagcagttccagtttaacattggtaaaacctggtaattgttcactgcaaaggaatgcattggtagtgtagcgatgacttttggcgatgcccccagggatcgccaggccacgcaaagagctgtaccttcgggtgcaaatgggatggtaagaagtttattgtgaaaaagtggttattagctgcaggtcttggtttggcgatggtaacgtccgcacaggctgctgacaaaattgcaatcgtcaacatgggtaatctgttccaacaggttgcgcagaagacgggtgtatccaatacactggaaaacgaatttaaaggccgtgcggctgaactgcaaaaaatggaaaccgatctgcaatctaaaatgcagcgtctgcaatccatgaaagcaggtagcgatcgtactaagctggaaaaagacgtgatgtctcagcgccagactttcgcacaaaaagcgcaggcttttgagaaagatcgcgctcgtcgttccaacgaagaacgcaacaaactggtgactcgtatccagactgcggtgaaaaaagtggctaacgaccagagtatcgatctggtggtagacgcaaacaccgttgcttacaacagcagcgatgtgaaagacatcaccgctgacgtactgaaacaggttaaataagtaatgccttcaattcgactggctgacttagcagaacagttggatgcagaattacacggtgatggcgatatcgtcatcaccggcgttgcgtccatgcaatctgcaacaacaggccacattacgtttatggtgaatcctaagtaccgtgaacacttaggtttatgccaggcttctgcggttgtcatgacgcaggacgatcttccttttgctaagagtgcggcgctggtagttaaaaatccctacctgacctacgcgcgcatggcgcaaattttagatactacgccgcagcccgcgcagaatatcgcgccaagcgccgtgattgatgcgacggcaacgctgggtagcaatgtttcagtcggcgcgaatgcggtgattgaatctggcgtacaactgggcgataacgtggttatcggcgcaggctgtttcgtcggaaaaaatagcaaaatcggggcgggttcacgcttgtgggcgaacgtaacgatttaccacgacattcagatcggtgagaattgcctgatccagtccagtacggtgatcggcgcggacggttttggctacgctaacgatcgtggcaactgggtgaagatcccacaactgggccgggtcattattggcgatcgtgtcgagatcggcgcttgtaccaccattgaccgtggcgcgttggatgatactgttattggcaatggcgtgattattgataatcagtgccagattgcacataacgtcgtgattggcgacaatacggcagttgccggtggcgtcattatggcgggtagcctgaagattggccgttactgcatgattggcggcgccagcgtgatcaatgggcatatggaaatatgcgacaaagtcacggtaactggcatgggtatggtgatgcgtcccatcacggaaccgggcgtctactcctcaggcattccgctgcaacccaacaaagtatggcgtaaaactgctgcactggtgatgaacattgatgatatgagcaagcgtctcaaagcgattgagcgcaaggttaatcaacaagactaacgttccgccttgtagttgccattcttttccggcctgtcacattcatacgattgcggcaggccgtgttattattgcctttttgtatatttggacaggaagagtattttgactactaacactcatactctgcagattgaagagattttagagcttctgccgcaccgttttccgtttttactggtcgatcgcgtgctggactttgaagaaggtcgttttctgcgtgcggtgaaaaatgtctccgtcaacgagccgtttttccaggggcatttcccgggcaaaccgattttgccaggcgtgctgattctggaagcgatggcgcaggcaaccggtattctggcgtttaaaagcgttggtaaactggaacctggcgaactgtattatttcgcgggtattgatgaagcgcgctttaagcgtccggtggtgccaggcgatcagatgatcatggaagtcactttcgagaaaacgcgccgtggcctgacccgctttaaaggggttgcgctggtcgacggtaaagtcgtgtgcgaagcaaccatgatgtgtgctcgtagccgggaggcctgattcgtgattgataaatccgcctttattcatcctaccgccattgtggaagacggcgctgtaattggcgctaatgcccacattggtcccttttgtattgttgggccgcaggtcgaaattggtgagggaaccgtactgaagtctcatgtggtcgtgaatggtcaaaccaaaatcggccgcgacaacgagatttatcagtttgcctccatcggtgaagtgaaccaggatctgaaatatgcgggtgagccgacccgtgtggaaattggcgatcgtaaccgcatccgcgaaagcgtcaccattcatcgtggtacagtgcagggcggtgggttgacgaaggtgggtagcgataacctgctgatgatcaatgcgcatgtcgcacatgattgtacggtaggtaatcgctgtatcctcgccaacaacgccacgctggcggggcacgtatcagtcgatgattttgcgatcatcggcggtatgacggcagttcatcaattctgcattatcggtgcgcatgtgatggtcggcggctgctccggcgtggcgcaggatgtccctccgtatgtgattgcgcagggtaaccatgcgacgccgttcggggtaaatatcgaagggctgaagcgtcgcggctttagccgtgaagggctggtggcgattcgtaatgcctacaaactgttgtaccgcagtggtaaaacgctcgacgaagcgaagctggaaatcgctgaacttgctgaaaagcatccggaagtgaaggcgtttaccgagttctttgagcgttcaacgcgcggtccgattcgttaatggcggcacagcgtcctttaacgattgccctggtcgccggtgaaacgtccggcgatattcttggcgcaggcttaattcgtgcgctgaaagcgcgcgtacccaacgcccgttttgtgggcgttgcggggccgcgtatgcaggccgaagggtgtgaagcctggtacgagatggaagagctggcggtcatgggcattgttgaagtgctcggacgtttacgccgtttgttgcatatccgcgccgatctgacccgccgttttaccgaactcaagcccgatgtctttgtcgggattgatgcccctgatttcaatattaccctcgaaggtaatctgaaaaaaaaagggattaagaccattcattatgtcagcccgtccgtttgggcctggcgacagaaacgcgttttcaaaataggcagatccacccatatggtgttggcttttctgcctttcgaaaaagcgttttacgataaatttaacgtcccgtgccgctttatcggtcacaccatggcggatgccatgccgctggacccggataaaaatgcggcgcgcgacgtgctgggtatcccgcatgacgcccattgtctggcgctactgccaggcagccgtggcgcggaagtggaaatgctcagcgccgatttcctgaaaaccgcacaattgctgcgacagcgctatcccgatctggaagtggtagtgccgctggtgaacgcgaaacgccgcgagcagtttgaaaaaattaaagcggaggttgcgccggatctcgccgttcatttgctggacggcatggcgcgcgaggcgatgatcgccagcgacgcggctctgctggcctcgggtacggcggcactggagtgtatgctggcaaaatgcccgatggtagtgggatatcgtatgaagcccttcactttctggctggcgaaacgtctggtgaaaacggagtatgtgtctttgcctaacctgctggcgggaagagaattagtcaaagagctgttgcaggaagagtgcgaaccgcaaaaactcgccgaagcgctgttgccgctactggcgaacggtaaaaccagccatgcgatgcacgacaccttccgtgaattgcatcagcagatccgctgtaatgccgatgagcaggcggcagatgccgtcctggagttagcacaatgatcgaatttgtttatccacacacccatttagtggcgggtgtggatgaagtgggccgtggcccgctggtgggcgccgtagtgaccgccgccgtgatcctcgatccggcgcgtccgatcgtcggtctgaatgattccaaaaaattgtctgaaaagcgtcgtctgtcattgtatgacgagattaaagaaaaggcgttaagctggagtctggggcgcgcggaagcgcatgaaattgatgagctgaatattttgcacgccaccatgctcgccatgcagcgcgctgtcgctggtctgcatattgcgccagaatatgtgctgatcgacggcaatcgctgtccggagctgcctgtgccgtcaatggccgtggtgaaaggcgacagccgcgtggcggagattagcgcggcgtctattctggcgaaagtcacccgcgacgcagaaatggcggcgctggatatcgtttttcctcagtatggctttgcgcagcacaaaggctatccaaccgcttttcatctggaaaagttggcccagtatggcgcgacggcgcaccaccgacgcagttttgcgcctgttaaacgcgctctgggacttgtgtcctgattcttgtatcgagaaatctgaagatgtctgaaccacgtttcgttcacctgcgggtgcacagcgactactctatgatcgatgggctggcgaagaccgggccgctggtgaaaaaggcggcctcattaggtatgcctgcgctggcgatcaccgattttaccaacctctgcggtctggtgaagttctacggagcgggtcatggcgcgggcattaaacccatcgtcggggcggactttaacgttcacaacgaactgctgggagatgagctgactcatctgacggtactggcggcgaataatacgggataccagaacttgacgttgctgatctcgaaagcgtatcagcgcggctacggcgcggcaggcccgattatcgagcgcgactggctggtagagcttaaagaaggtttgatcctgctttccggcgggcgcatgggcgacgtaggccgctgtctgctacgcggcaaccaggcgctggtggaggagtgcgttgctttctatgaagcgcattttcccgatcgctacttcctggaactgatccgtaccggcagacaggatgaagagacctatctccatgctgcggttgagctggctgaggcacgtggtttgccggttgtcgcgacaaacgatgtccgttttcttgaaagcgatgattttgacgcccatgagattcgtgtcgcgatccacgacggtttcacgctcgacgatcctaaacgtccacgcaattattcaccgcagcagtatatgcgcagtgaagaagaaatgtgcgagctgttctccgatattccggaggcgctggaaaatacggtggagattgccaaacgctgcaacgtaacggtgcgtctgggtgaatatttcttgccgcagttcccgaccggcgatatgaccaccgaagattatctggtcaaaaaagcgaaagaggggctggaagagcgtctggctttcctgtttccggacgaagaagagcgcaaaaagcgtcgcccggaatatgacgagcgtctggatattgaactacaggttatcaaccagatggggttccctggctacttcctcatcgtgatggagtttatccagtggtcaaaagataacggcgtgccggtagggccgggacgtggttccggggctggttcgctggtggcctacgcgctgaaaattaccgaccttgatccgctggaatttgacctgctgttcgaacgtttcctgaacccggaacgtgtctcgatgcctgacttcgacgttgacttctgtatggagaaacgcgaccaggtgattgaacacgtcgcagatatgtacgggcgtgatgcggtatcgcaaattatcaccttcggtacgatggcggcgaaagccgttatccgcgatgtgggccgcgtgctggggcatccgtacggttttgtcgatcgtatctcgaagctggtgccgcccgatccgggcatgacgctggcaaaagcctttgaagcggaaccgcaactgccggaaatttacgaggcggatgaagaggtcagagcgctgatcgatatggcgcgtaagctcgaaggcgtcacgcgtaacgccggtaagcacgctggcggcgtggtcatcgcgccgaccaaaattaccgactttgcgccgctgtactgcgatgaagagggcaagcatccggttacccagtttgataaaagcgacgtggaatatgccgggctggtgaagttcgacttcctcggtttgcgtacgctgactatcatcaactgggcgctggagatgatcaacaagcggcgggcgaagaatggcgagccaccgctggatatcgctgccattccgctggacgataaaaaaagcttcgacatgctgcagcgctcggaaaccacggcggtcttccagcttgaatcgcgcggcatgaaagatctgatcaaacgtctgcagccggactgctttgaagatatgatcgcgctggtggccctgttccgtcccggcccgttgcagtcagggatggtagataacttcatcgaccgtaagcacggtcgtgaagaactctcttacccggacgttcagtggcagcatgaaagcctgaagccggtactggagccgacctacggcatcattctgtatcaggaacaggtgatgcagattgcccaggtactttccgggtatactctcggcggcgcggatatgctgcgtcgtgcgatgggtaagaaaaagccggaggagatggccaaacagcgttccgtttttgaagaaggcgcgaaaaagaacggtatcgacggcgaactggcgatgaaaatctttgacctggtggagaaattcgccggttacgggtttaacaaatcgcactccgccgcttatgcgctggtttcttaccagacgctatggctaaaggcgcactatccggcagagtttatggcggcggtgatgactgccgatatggacaacaccgagaaggtcgtcggcctggtggacgagtgctggcggatgggactgaaaattctgccgccggatattaactccgggttgtaccatttccacgttaatgatgagggcgagatcgtctacggtattggcgcgatcaaaggcgtcggcgaaggtccgatcgaagcgatcatcgacgcgcgtaatcagggcggctatttccgcgagctgtttgatctgtgcgcgcggaccgacaccaaaaagctcaaccgccgggtgctggaaaagctgatcatgtccggggcgttcgaccgcctggggccgcaccgcgccgcgctgatgaactcattgggcgatgcgctgaaagccgccgaccagcacgccaaagcggaagctatcggtcagacggatatgttcggcgtgctggcggaagagccggagcaaatcgaacaatcctatgccagctgccagccgtggccggagcaggtggtgttagatggggaacgtgaaacgttggggctgtacctgacgggccaccctatcaatcagtatttaaaagaaattgagcgctatgtcggcggggtaaggctcaaagacatgcatccgacagaacgtggtaaagtcaccacggctgcggggctcgtgattgccgcaagggttatggtcaccaagcgcggcaatcgtatcggcatctgtacgctggatgaccgttccgggcgtctggaagtgatgttatttaccgacgcgctggataaataccagcagttgctggaaaaagaccgcatacttatcgtcagcggacaggtcagctttgatgacttcagcggggggcttaaaatgaccgcccgcgaagtgatggatattgacgaagctcgcgaaaaatacgctcgcgggcttgctatctcgctgacggacaggcaaattgatgaccagcttttaaaccgactccgtcagtctctggaaccccaccgctcggggaccattccagtacatctctactatcagagggcggatgcgcgtgcgcggctgcgttttggcgcaacgtggcgtgtctctccgagcgatcgtttacttaacgatctgcgtggcctcattggttcggagcaggtggaactggagtttgactaatacaggaatactatgagtctgaatttccttgattttgaacagccgatagcagagctggaagcgaaaatcgattctctgactgcggtaagccgccaggatgagaaactggatattaatatcgatgaagaagtccatcgcctgcgcgaaaaaagcgtagaactgacgcgcaaaatcttcgccgatctcggcgcatggcaggtagcccaactggcgcgccatccgcagcgtccgtacaccctggattatgtccgtctggcgtttgatgagtttgatgagctggcgggcgatcgcgcctatgctgatgacaaagccatcgtcggcggtatcgcgcgtctggaagggcgaccggtgatgatcattggtcatcagaaaggtcgtgaaaccaaagaaaaaattcgtcgtaactttggcatgccagcgccggaaggctaccgcaaagcgctgcgcctgatggaaatggctgaacgcttcaacatgccgattatcaccttcatcgacaccccgggtgcataccctggcgtgggcgcggaagagcgtggtcagtctgaagccatcgcccgcaacctgcgtgagatgtctcgtctgaacgtaccggtcatctgcaccgtgattggcgaaggcggctccggcggcgcattggcgattggcgtgggtgataaagtgaatatgctgcaatacagcacctattccgttatctccccggaaggttgcgcctctattttgtggaagagcgccgacaaagcaccattggctgctgaagcgatgggcatcatcgcgccgcgtctgaaagagctgaagctaatcgattccatcattccggagccgctgggcggcgcgcaccgtaatccggaagcgatggcggcatcgctaaaagcgcagctgctggaagatttagccgatctcgatgtgttaagcaccgatgatttaaaaaaccgtcgttaccagcgtttgatgagctacggttacgcctaatcatttacctcatttttccccaagaggccggataatccggcctcttttttttggtcgaggaaaaatgagacgccgatgagttgatgtgattaaacgcaacggcatgttctccctgacactgtatcaactgccaggcgtgtggccagggcaggcagtgaactacccttcaaggagaaaattatgggattgcaaaaaacactggcgctcagcgccgtagcggcagggatcatgttgagcttatccggtgcgcaggccgcgccgctgcttagcagtagtgagccaatgaccattaacgccagcgatctggcggcgaaagagaaagcgctaacggattttccgttaatggaggccgtgaaatcctctattcagacgttggataacagcgcggtcgaacaaatcgaaccggggcgcgccgctaacccggcaaacgtaaaacgcgttgaaagtattctgaaagaggccgactgggattatctgttcccgatgcgcgcgccggaatatacttactctaacttcctgaaagcgataggtaaattcccggcggtttgtggtacctacaccgatggacgcgatagcgacgctatctgccgtaaaaccctggctactatgtttgcgcattttgcccaggagacgggcggtcacgaaagctggcgtgacattccggaatggcgtcaggcgctggtctatctgcgcgaagtcggctggacagaagggcagaaaggcggctacaacggcgaatgtaacccggatgtatggcagggccagacctggccgtgcggtaaagataaggacggcgatttcctcagctattttggccgcggggcaaaacagctttcttataactacaactatgggcctttctctgacgcgatgtatggcgacgttcgccctctgctggataaacccgagctggtggcggatacctggatgaacctggcgagcgccgtcttcttctttgtgtatccgcagccgccgaagccgtctatgctacatgtgattgacggtacctggcagccaaacgatcgcgataaagcaaacggcctggtatcaggtttcggcgtcactattcagatcatcaatggcggcgtggagtgcggcggcgcagatgagaatgcgcagtcgcttaaccgcatcgcctactacaaagagtttgccaactacctgaaagtgccggtgccggcggacgaagtgttgggctgtaaaaagatgaagcagttcgatgaaggcggcgctggcgcgttaccgatctattgggaacaagactggggctggagcgccgatactgcggacggtaaaacctattcctgccagttagtgggatatcagacgccgtataccgcctttaaagagggcgactacacgaaatgtgtacagcattatttcaacgttaatgtcgtcgatgataacggaaccactgaaccggatgtcacgccaactccggcgccagtgacggatgaaaacgtggcgccagtcgcgcgcattgccggaccggtcggggcggtggaagccggtagcccggtttcactcagcgcggaaggatcgaccgacgcgaatggcgacaagctcacctatacctggatgtcgcaggatggcaaaacgctgagcggccaggataaagccgttgtgattttcaacgcgccggatgtcactcagaacacccagtatgtggtgaatctgaccgttagcgacggtacgctctccagtacagcggtttatacgctgaatgtgaaagcgaaggccgccgctgcggatgacgaagataagaccaccagctaccctgcctggagcagcagccagaaatggaatccgggcgacatcgtcaacagtaatggcgcattgtaccagtgcaaaccgttcccggaaggctcatggtgtaatgttgcgcctgcctactatgagcccggcgtagggattgcctgggccgatgcatggaacgcattgtaataagataaatcctgtcggtgctttgcatcggcaggattgttactatgcttatctcaggttttttcaggagaaagcatgaacatcatcgccattatggggccgcacggggtttattataaagatgaacccatcaaggagcttgagcgtgcattacaatccctgggatttcaaattatctggccgcaaaatagcgttgacttgttgaagtttattgaacataacccgcgcatctgcggcgttatttttgactgggatgaatacagtctcgacctttgtagcgaaatcaaccagctaaatgaataccttcctctctacgcctttatcaataccaactccacgctggacgttagcgttcacgatatgcgcatggcgctgtggttttttgagtatgcattggggctggctgaagatatcgcgacgcgcattcatcaatatacaaacgaatatctcgataatattacgccgccgtttaccaaagcgctttttacctacgccaaagaaggaaaatataccttttgtacgccgggtcatatggcgggaacggcgtatcagaaaagcccgccaggctgcctgttttatgacttttttggcggcaataccttaaaagctgatgtgtcgatttcggtgactgaactgggatcgctgctggatcacaccgggccgcatctggaagcggaagagtatatcgcccgtacttttggcgccgagcagagctatatggtgacgaacggtacgtcgacctcgaataaaattgtcggtatgtatgccgcgcctgcgggaagtacgctacttattgatcgtaattgtcataaatcgctggcgcatttgctgatgatgagcgatgtggtgcctctctggttgaagccgacgcgcaatgcgctcggcattctcggcggtattccccgaagggaatttacccgtgcaagcatcgaaagcaagatagaggagacccctcaggcgcaatggccggtgcatgcggttatcaccaattcgacttacgatggtctgctgtataacactaactggatcaagcaaatgctggacgttccctcgatccattttgattccgcctgggtaccctatacccatttccatccgatctaccaggggaaaagcgggatgagcggcgatcgggtgcccggaaaagtgattttcgaaacgcaatccacccataaaatgctggcggctttttcgcaggcgtcgcttattcatatcaaaggggaatatgacgaagagacgtttaacgaagcgtttatgatgcacacttccacatcgccgagctatcccattgtcgcctctatcgagaccgcagcggcgatgctgcgcggcaatccagggaaaagattgattaatcgttcggtggaacgggcgctccattttcgtaaagaggtacagcggctacgtgaagagtccgatagctggttctttgatatctggcagccggaagaggttgatgaggccgaatgctggccggtcacgccgggagaaacctggcatggcttcaccgatgccgatgacgatcatatgttcctcgatccggttaaggtgacaatcctgacgccggggatggatgaacagggcaacatgagcgaagaggggatacccgccgcgctggtggcgaagttccttgatgagcgaggcgtggtggtggaaaaaaccgggccgtataatctgctgtttttgttcagcatagggattgataagacccgtgcgatggggctgctgcgcggactgacggaatttaaacgcgcctacgatcttaacctgcgcgtcaaaaatatgttgccggatctgtatgcggaagatccggatttttatcgcaatatgcgcattcaggatctggcgcaggggatccataaactgatccgccagcacgatcttccggggctgatgctgcgggcgttcgaggttttaccggagatgatcatgaccccgcaccaggcctggcagcgtcagatcaaaggtgaggtggaaaccgtggcgctcgatcaactgccagggcgcgtttccgcgaatatgatcctgccttatccgccaggcgttccgctgttgatgcccggcgagaggatcacgcaacagagtcgggccgtgctcgattttctgctgatgctctgctcgattggccagcattatcccggttttgaaacggatattcacggcgcgaaacggaatgaagacggggtgtaccaggtacgagtcttaaaacacgcctgctagcttgcctgacgggaatgtgacgagtaacgtactgataatcaataaaggagacgctatgctgggattaaaacaggttcatcacatcgcgatcattgcgacagactatgcggtgagcaaggcgttttattgcgatattctggggttcgatctgctaagcgaagtctggcgggaagagcgtgactcgtggaagggcgatttggcgctaaacgggcagtatgtgattgagcttttctcttttcccttccctccggcgcgtccaagccgacctgaagcctgcggcctgcgccatctggctttcagcgtggaaaatgtggaaaacgccgttgcgcatctggaaaagcatcaggttaagtgcgaaccgatacgcatcgatccgtataccgggaagcgctttacttttttcaacgatccggacggtttaccgcttgagctgtatgagcagtaaggcttgtcattaagacgctcgccaggtaacgttgccgggctaagtcactataagcatggatcatgaccactctcacgttgaatacctcgttactctcttctcgccgtattctggctgcctttagcggcggcctggattctacggtgctgttgcatcaactggtgttgtggcgagaacgccatcctgacgtcacgctgcgtgctatccatattcatcacggtttaagccctcatgctgatagctgggtgcggcattgcgaaaccgtatgcgaacgctggcaggttccgctggtagtggagcgggtgacgctggcggataatggcctgggtatcgaggcccatgcgcgtgaagcgcgctaccgggcgttcgcacagacgctattgcctggcgaagtgctggcaaccgcgcagcaccttgacgatcagtgtgaaacgtttctgctggcgttaaagcgcggcagcggtccggccggactttccgcgatgggagaacgctcgccttttgccggaactctgcttcttcgcccgctgttgagagaaacgcggaagacgctggaacagtgggctgtgcgtcatggcttatgctggattgaagatgaaagcaatcaggatgacgcctacgatcgcaattttttacgcctgcgcgcgcttccgctcttacagcagcgctggccgcattttcctgcggcggtagcccgtagtgcgacgctctgcgccgagcaagaaaggctgctggacgagcttctggccagcgatcttactgactgtatcacggcggagggaacattgcggctctctccattaatgtcgatgagcgatgtacggcgggcggcgattttgcgtcgctggctggcgatgcgtaatgcgccgatgccctctcgcgacgcgctggaacgtatctggcaggaggtggcgctggcgcgcgacgatgcctctccctgtttacgctttggcgatcacgagattcgccgttaccagtcgcaactgtggtggattaaatccgtggccggacaacacgaaacgacggtcgcctggcccgtctggcaaacaccgctggcgctgcctgccggcttagggacggtacagctcgttcctggtggcgaactgcgccgaccgcgagaggaagaatccgtcagcattcgttttaaagcgccaggcgtgttacatattgtcgggcgtaacggtggacgtaaattaaagaaaatctggcaggagcaggggatcccgccctggcgacgagataccacgccgctgttgttttacggcgaaacgctgattgcggctgcgggtgtttttgtgacgcgtgagggagcagcagaagataaagaaggggtgagtctggtttggcatgcctgatggcgctgcgcttatcaggcctacgtatcgcatggaacgtaggccggataaggtgcttgcaccaccatccggcaacaaaatactcaggattcgctaactaccacggtaccaatttccgggtggctgaaactggcgattttatcgagacgaagttcacaagactcgccggaaacttcggcaagcagatattctacgtttttacgtaagatcaaatcgttcgcttttgcctgcaaaacctcgccatcttttaacgttagcgtcagtattaaatgatgcatgcaggcaagctcaagactatcgtagtcatcgcaattaatgggttgatacgtttcattcattgacataatcgctcaccagtaagttcgcggcagcataagctgccttttccctgaccgactctgaaagggcgctatctgccgccacttcattaagcactttcaatacacaacccagcgcatccgggacataccctaagtctccgctggcgatttccgcataccgcttgcgtactaactcacaatatttttccacatgccctcctgtcagcattctgacttaaccgtggatgcaagtctaagcctacgaagttaaatcttgtttagcaaggtgactataccatactcatttgcgcaatatcagcgcctgacgcgagtgggtaaaagattcgttaacagccttttagcgcggttttcgctacaatgggcgcctgattcgaaaggagttttctcatggcgcttaaagcgacaatttataaagccgtcgtcaatgtggctgaccttgatcgcaaccggtttctggatgcggcattgacgctggcgcgtcacccttctgaaacgcaggagcgcatgatgctgcgcctgttggcatggataaaatatgctgatgaacggttgcagtttacacgtgggctcagcgcggaagatgagccggaggcctggctgcgcaacgatcatctgggcatcgatctctggatagagctggggctgccggatgagcgccgtattaagaaagcctgtactcaggcgagcgatgtcgcgctctttgcttataactcccgggcggcgcaaatctggtggcagcagcatcaaagcaagtgcgcgcagttcgctaacctgtccgtctggtatctggatgacgggcagctggcgcagctcagtgaatttgccgatcgtaccatgacgctacaggcgacgattcaggacggcgcaatctggctttctgatgctcggaataatctggaaatacagctaaccgcctggcaacagccctcatgattgccatctcccggacggtctccatagccgataatgagctggaaattacggccattcgtgcgcagggcgcgggtggtcagcacgtaaataagacctctagcgcgattcatttgcgctttgacattcgggcctctggcctgccagagtattataaacagcgtttgctgacggccagccaccatctgataagcgatgatggcgtcattatcattaaggcgcaggagttccggagccaggagctcaaccgggaagcggctatcgccaggctggttgccgtcataaaagaattaaccgcggagcagaaaagccgtcgcgcaacccgtccgacgcgtgcctcgaaagagcgccgtttgtcctcaaaggcgcaaaaatcttctgtaaaggcgcttcgcggcaaagttcgtcgtccactggattgacgggcaggaatagcaatttcataaggattttatggtgagaacagcaatattgtcagtagcggcagcctgtacgctatttgcattgatagggtgtaataaccgtgcggaagttgacgccctgcaacctgcgcaggcggcggaattaaaacccatgcagcaaagctggcgcggcgtgctgccctgtgcggattgtgaaggtattgaaacgtcactatttctggaaaaagacggcacatgggtgatgaacgagcgctatcagggcgtgcgcgaagaaccttcctcttttgcgtcatacggtacctgggcgcggacggcggataaactggtgttaaccgacagcaatggcgagaaatcgtattatcgcgcgaagggcaatgcgctggagatgctcgacagagaaggcaatccggtggcttcgcagcttaattatacgctggtgcctgttaccgccagcctgccggtaacgccaatgccgctgcgtggtatgtatgtatgtatacagggccgatgcggcgacctttaccgattgcgcgaccggaaaacggctgccggtcgccagtaacgcccagcttgagcgcggctatctggcggcgaaaggtgaagcggaaaaaccggtgctgctgacggtagaagggcattttgtgtttgccgcgaacccggacacgggcgagccggtaaaaacgctaatagccgataaaaatgcgaagtttgcgccgggtaaagattgcactcactaataaaaggcctcgcagggtgcgaggcctttacatatctgccggatggcgccgggcaaccccaacaaaatgtcgtttagcccttaatcgccttgaccagataatcaacgatatcgccggttttaatcagcgatttttcaccgctacgacggtatttatactcaatatcgtcgttatccaggttgcgatcgccaatcacgatagtatgtggaataccaatcagctccatatcggcaaacatcacgcccgggcgctctttacggtcgtccatcagcacttcaatgccctgcgcgcgcaattcgctgtacagcttttccgccagctcctgcacacggaaggatttgtgcatattcatcggcagaatagcgacctggaaaggcgcaatggcgtcaggccatacaatgccgcgctcgtcaaagttctgctcgatagcagcggcaacgacacgtgttacgccgataccgtagcagcccattgtcaggatctggttacggccatcttcaccctgaacggaggctttcagcgcttctgagtacttggtacctaactggaagatgtgacccacttcgataccgcgtttgataagcaacgttccctgaccatccggactcggatcgccggcgactacgttacggatgtcggcaacaacaggcgtcgccacatcgcgatcccagttaataccaaagtagtgtttaccgtcgatgttggcgccagcggcaaaatcgctcatggcggcaacggtacgatcgatgatgaccggaatcggcatattgaccgggccgagggagccagggccggcattaattacggcgcgaatctcttcttcggtagcgaaggtcagcgggctggcaacgtgcggcagtttttccgctttaacttcattcagttcatgatcgccgcgaaccagcagagccaccagcggagacttgctgtctttcaccgctttcaccagcagcgtttttaccgttttttcaattggcaggttgaattgttccaccagctccgcgatggttttggcatttggcgtatcgaccagagtcatttcctgcgtcgccgctgcgcgcggcgtttgcggcgcgatagcttctgccagttcaatgttagccgcgtaatcagaaacatcagagaaaacgatatcgtcttcgccgctttgcgccagcacctggaattcatgcgaggcgttgccgccgatagaaccggtatcggcctgtaccgcgcggaaatccagccccatacggctgaagatacggctatacgcggcgtacatggcgtcataggtttcctgcaacgactcctgagaggtgtggaaagagtaagcatctttcatcaggaattcgcgcgaacgcatcacgccaaagcgcggacgcacttcatcacggaatttggtctggatttggaagaagttcagcggcaactgcttataagagctgagttcattacgcaccaggtcggtgataacttcttcgtgggtcgggccgagtacgaacggacgctcgccacggtcgacaaaacgcagcagttccggaccgtactgttcccaacgaccactctcttgccacaggtcggctggctgaacgactggcatcgacacctcgatagcaccggcgttgttcatctcttcacgcacgatgttttcgacttttttcaggacgcgcaggccggtcggcagccaggtatataacccggaggcgagcttgcggatcatcccggcgcgcagcatcagctggtggctgataacctcggcgtcggcaggtgtctccttcagagtggagagcaggtattggctagtacgcatgttgttacggttccagttgaacgatcgaacaggctcaatgtgagcctgatacaaaaaaagtgatttagtttaccagcgtgcaagagatgtcaaaagagaagggcgtgaaattaccgtggttccagcgcaaacacttcaaatcccgagttaaccacacgccagcgcacgttaaaatcatgcagccagacggcataggttttgcccgtctcttcacccttacgataagccgggcgaggatcttgcgccagcacatcgcaaataaatgtccgtagctgcggataacgcctttccagcgtcgtaagctgttgagccacctcagcggtaaaactcacgggcatttcagctatcggcgcctgttgcgcatagctggcggcggcgtccggtaaggcctcggcaaacggtaaatacggtttaatatccaccaccggcgtgccatccaccagatccagactgcctaatttcagaattacgctctctttccggcactcgataccttttagcgcaacgagcgacatgccaatcggattggggcggaacgtggagcgcgtggcaaaaacgcccattctggcgttaccgccaagacggggcggacgaactgtcggccgccagccgccgtccatcgtctgatgaaaaacgaaaagcacccacaaatggctgaacgcttccaggccgcgaacggcatcggcctggttgtaaggcgctatcagatgcagttcgccgcaggcgcttttgaccagaccaggctggcgcggaacggcgaatttttctttatagggggagcgaataacgccgatttgttcaaactgaaagctgctcatttcgccgaaatattcagggcggacccgatacaaaccgcctgacgatagcagcctggcgtgccgctggtaatttcacagctgtgcagcaggacggcgttggctttcattttagatgcattaatctgcatacgcttgcgcgcagttggaatgttaggcggagagtcttgatttgtcgcctggcaggattcgccgctaacctcgccaagatctcggaaaggtttgccgactaagtcttcagcattggtgtaaatcctgacgggagcggcacgcggcgctttaggtttctccggctccgcttttggcggggttgcggtgctttgaacgggttcaacaggggatctgcttagcatggaacaaccgcccagcatgagtgccaataaacagatcggtaaagcacgcataatatttcctcaatgaatgttctaattgccagatattgaatcaggagcttgcataaatgacaagacgggcaatagcccgtcctgaataatattacagattgtggaatcagcctaaaacttaccagcctttcaccgcgccgccattaaaaactttatttgcggcttcgtacacttcatcagactgataagcctgaacgaattttttcacattctcggcgtctttgttatcttcacgcgtcacgatcaggttaacgtacggagaatctttatcttcaacaaagataccgtctttcgctggcgtcaggccaatctggctggcgtatgtcgtattgatgaccgctagcgcgatctgcgcgtcatccagcgaacgcggcaactgcggcgcttccagctcaacaattttcagatttttcgggttttccacgatatccagcgaggtaggaagcagaccgacgccgtctttcagtttaatcagccctactttttgcagcagcagcagggaacgaccaaggttggtcgggtcgttaggcacagcgacctgggaaccgtccttgagctcatccagggatttgatttttttggaatatcctgcaatgggatagacaaaagtcttaccaacggaaaccagtttgtaaccgcgatctttgatttgctgatccagatacggtttgtgctggaaggcattggcatcgatatcgcctttgctcagcgcttcattaggcagaacataatcattaaaggtcaccaattccacgtccaggccgtatttttctttcgcgactttctgcgcgacttcggcaacttgctgctctgcgccaacgattacgccgactttaatatgatttggatctttttcatcctgaccgcaacccgcaagtgccagagaaccaatcagagcacccactgccgcaaaggttttgaatttgaacgccatgcttatttccttaatgagtatttgtgttgtgtttaacgttacttatgcgtgacagccctgacgatgcgatcgccggataactgaattaaataaaccagaacgacaagtaataccagcaccgtattcatcacggtagcattgtatccaatataaccgtactgatagccgatttgaccgagaccgcctgcgccgacggcgccgcccattgcggagtaaccgaccagggtgatcagtgtaatggttgccgcattcaccagaccaggcagcgcttccggtaaaaggattttacgtacaatttgcagcggcgtggcgcccatcgctcgtgaggcttcaatcagcccggcagggatctctaacaacgcattttccaccatacgggcgataaaaggcgcggcgccgacggtcagcggtacaattgcagcctgcaaaccaatggaggtgccgacaattattcgggtaaaaggaatcatccacaccagcaggatgataaagggaatcgagcggaaaatattgaccaccgcagagagggagcgatacagcctggcgttctccataatctgccccgggcgcgtaacatacagcaatacgccaaccggcaggccaatcacgaaaccgaagaaaccggagacaaaggtcatcgccagcgtttcccagacgccacgaaccagtaaccacatcattgcctcagacataacccagtacctctactttcacatggtgatcctgcagccaggcaattgcggcttgcgtctcttcttgcgtgccgtgcatttccgttagcataatgccgaacttcacaccgccggcgtaatccatctgcgcgctgataatattattgttcacgttgaaacgacgcgcggtttcagaaagcagcggggcatccacagactgcccggtgaattccatgcgcagcatcggcacgctgtcagtttccggcgacgctttcaaacgcgcctggtaatcttccggaatgtccagatgcagagtggactgaataaacttctgcgccagcggcgttttaggatgcgagaagacttcgctgaccgtatcctgctcaataagctcgccattactgataacggcaacgcagtcgcagatacgtttcacgacatccatttcatgagtgataagcagaatcgtcaaccccagacgacggttgatatctttcagcaattccaaaatcgaacgggtcgttgcgggatcaagcgcgctggtggcttcatcgcacagcaacacttttggattactggctaacgcgcgggcaatcgcgacacgctgtttctgaccgccggaaagatttgccggatagctgtcgtgcttgtcgccaagaccgactaaatccagcagctctgtgacacggcgtttgatctcttcctttggtgtgttatccagttccagcggcaacgcgacgttgccaaacacggtacgggaagagagcaggttaaaatgttggaaaatcatgccgatttgacggcgagctttggtcaactcagactctgaaagcgttgttagctcctgaccgccgacctgaacgctaccttcggttgggcgttcaagtaagttaacgcagcggataagcgtacttttaccggcgccggaggcgccaatgacgccataaatctgcccggcaggaacgtgcaggctgacattatttagcgcctgaatggtgcgcgtcccctgctggaacactttggtaatattcgaaagtttaatcattgattctttattatcgtaatgaaatgagcggaggcattttcgtctgcctaatacggtcaacgccgtcaacagaatggatgttaaggcatccagacgtctaaatcaatcaggctttatacgatgagcactttcttgcctgctgaaacatgcgatactagcgccacttgctttactcaggagctataaaaggtggcaaagtttgtacccgcaatttttctcgaccgtgacggcaccattaatgtggatcacggctacgtacatgaaatcgatgcatttgagtttatagacggcgttattgacgctatgcgcgagctaaaaaaaatgggctatgcgttggtggtggtgacgaaccagtccggaatcgcgcgcggcaaattcactgaggcgcagtttgaaacgttaaccgaatggatggactggtcgttggcggatcgcgatgttgatttggacggcatctattattgtcctcaccatccgcagggcagtatagaagagttccgtcaggtatgtgattgccgcaagccgcatccaggaatgcttatctcggcgcgtgatttcctgcatatcgatatggcggcttcttatatggtgggagacaagctggaagatatgcaggcggcagcggcggcaaatgtcgggacaaaagtgctggtgcgtacgggcaaaccggtcacggcagaagcagaaaacgcggcggactgggtgttaaacagccttgctgacctgccatcagcgataaaaaagcagcaaaaataagcgttatggataaaagatgagcggttaaaacaaaaatgcatttttccgcttgtcttcctgaaccgactccctataatgcgcctccatcgacacggcggatgtgaatcacttcacacaaacagccggtcggttgaagagaaaaatcctgaaattcagggttgactctgaaagaggaaagcgtaatatacgctacctcgcaacggtgagcgaaagccgcgttgcactgctctttaacaatttatcagacaatctgtgtgggcactcgaagatacggattcttaacgtcctcggacgaaaaatgaataccaagtctcaagagtgaacacgtaattcattacgaagtttaattcattgagcatcaaacttttaaattgaagagtttgatcatggctcagattgaacgctggcggcaggcctaacacatgcaagtcgaacggtaacaggaagcagcttgctgcttcgctgacgagtggcggacgggtgagtaatgtctgggaaactgcctgatggagggggataactactggaaacggtggctaataccgcataacgtcgcaagaccaaagagggggaccttcgggcctcttgccatcagatgtgcccagatgggattagctagttggtgaggtaacggctcaccaaggcgacgatccctagctggtctgagaggatgaccagccacactggaactgagacacggtccagactcctacgggaggcagcagtggggaatattgcacaatgggcgcaagcctgatgcagccatgccgcgtgtatgaagaaggccttcgggttgtaaagtactttcagcggggaggaaggtgttgtggttaataaccgcagcaattgacgttacccgcagaagaagcaccggctaactccgtgccagcagccgcggtaatacggagggtgcaagcgttaatcggaattactgggcgtaaagcgcacgcaggcggtctgtcaagtcggatgtgaaatccccgggctcaacctgggaactgcattcgaaactggcaggcttgagtcttgtagaggggggtagaattccaggtgtagcggtgaaatgcgtagagatctggaggaataccggtggcgaaggcggccccctggacaaagactgacgctcaggtgcgaaagcgtggggagcaaacaggattagataccctggtagtccacgccgtaaacgatgtctacttggaggttgtgcccttgaggcgtggcttccggagctaacgcgttaagtagaccgcctggggagtacggccgcaaggttaaaactcaaatgaattgacgggggcccgcacaagcggtggagcatgtggtttaattcgatgcaacgcgaagaaccttacctggtcttgacatccacagaactttccagagatggattggtgccttcgggaactgtgagacaggtgctgcatggctgtcgtcagctcgtgttgtgaaatgttgggttaagtcccgcaacgagcgcaacccttatcctttgttgccagcggttaggccgggaactcaaaggagactgccagtgataaactggaggaaggtggggatgacgtcaagtcatcatggcccttacgaccagggctacacacgtgctacaatggcgcatacaaagagaagcgacctcgcgagagcaagcggacctcataaagtgcgtcgtagtccggattggagtctgcaactcgactccatgaagtcggaatcgctagtaatcgtggatcagaatgccacggtgaatacgttcccgggccttgtacacaccgcccgtcacaccatgggagtgggttgcaaaagaagtaggtagcttaaccttcgggagggcgcttaccactttgtgattcatgactggggtgaagtcgtaacaaggtaaccgtaggggaacctgcggttggatcacctcattaccttaaagaagcgtactttgcagtgctcacacagattgtctgatgaaaaacgagcagtaaaacctctacaggcttgtagctcaggtggttagagcgcacccctgataagggtgaggtcggtggttcaagtccactcaggcctaccagattcgctcccgtgctttgttgtggcaaagctcgcatacttcagtatgcttcgcttcaccacgccgcgcccggaaacgaatcaaaggtaagaggttctgactacacgatggggctatagctcagctgggagagcgcctgctttgcacgcaggaggtctgcggttcgatcccgcatagctccaccatctcgtgagtgtttacgaaaaaatacttcagagtgtacctgaaagggttcactgcgaagttttgctctttaaaaatctggatcaagctgaaaattgaaacacagaacaacgaaagttgttcgtgagtctctcaaattttcgcaacacgatgatgaatcgtaagaaacatcttcgggttgtgaggttaagcgactaagcgtacacggtggatgccctggcagtcagaggcgatgaagggcgtgctaatctgcgataagcgccggtaaggtgatatgaaccgttataaccggcgatacccgaatggggaaacccagtgtgattcgtcacactatcattaactgaatccataggttaatgaggcgaaccgggggaactgaaacatctaagtaccccgaggaaaagaaatcaaccgagattcccccagtagcggcgagcgaacggggaggagcccagagcctgaatcagcatgtgtgttagtggaagcgtctggaaaggcgcgcgatacagggtgacagccccgtacacaaaagcgcatgtgctgtgagctcgatgagtagggcgggacacgtggtatcctgtctgaatatggggggaccatcctccaaggctaaatactcctgactgaccgatagtgaaccagtaccgtgagggaaaggcgaaaagaaccccggcgaggggagtgaaaaagaacctgaaaccgtgtacgtacaagcagtgggagccccaccactaagccagtggtgaactccacatccgcatcctttgctgaggatacggttaacggagcgaaagcgacgttcaaccgcaaaacaagcagagggggcttagtggtggggtgactgcgtaccttttgtataatgggtcagcgacttatattctgtagcaaggttaaccgaataggggagccggagggaaaccgagtcttaattgggcgttaagttgcagggtatagacccgaaacccggtgatctagccatgggcaggttgaaggttgggtaacactaactggaggaccgaaccgactaatgttgaaaaattagcggatgacctgtggctgggggtgaaaggccaatcaaaccgggagatagctggttctccccgaaagctatttaggtagcgcctcgtgaattcatctccgggggtagagcactgtttcggctagggggccatcccggcttaccaacccgatgcaaactgcgaataccggagaatgttatcacgggagacacacggcgggtgctaacgtccgtcgtgaagagggaaacaacccagaccgccagctaaggtcccaaagtcatggttaagtgggaaacgatgtgggaaggcccagacagccaggatgttggcttagaagcagccatcatttaaagaaagcgtaatagctcactggtcgagtcggcctgcgcggaagatgtaacggggctaaaccatgcaccgaagctgcggcagcgaacgtatcacccaagacaactttacggagttgacgattgacggagcgaagcgacgtcaaagcgttcattaaagtcgagttggcttagggatacgttcgttgggtaggggagcgttctgtaagcctgtgaaggtgtgtcgtgaggcatgctggaggtatcagaagtgcgaatgctgacataagtaacgataaagcgggtgaaaagcccgctcgccggaagaccaagggttcctgtccaacgttaatcggggcagggtgagtcgacccctaaggcgaggccgaaaggcgtagtcgatgggaaacgggttaatattcccgtacttggtgttactgcgaaggggggacggagaaggctatgttggccgggcgacggttgtcccggtttaagcgtgtaggtgtgtgttccaggtaaatccggttcactttaacactgaggcgtgacgacgaggcactacggtgctgaagcaacaaatgccctgcttccaggaaaagcctctaagcatcaggtaacacgaaatcgtaccccaaaccgacacaggtggtcaggtagagaataccaaggcgcttgagagaactcgggtgaaggaactaggcaaaatggtgccgtaacttcgggagaaggcacgctgacacgtaggtgaagtgatttactcatggagctgaagtcagtcgaagataccagctggctgcaactgtttattaaaaacacagcactgtgcaaacacgaaagtggacgtatacggtgtgacgcctgcccggtgccggaaggttaattgatggggtcagcgcaagcgaagctcctgatcgaagccccggtaaacggcggccgtaactataacggtcctaaggtagcgaaattccttgtcgggtaagttccgacctgcacgaatggcgtaatgatggccaggctgtctccacccgagactcagtgaaattgaactcgctgtgaagatgcagtgtacccgcggcaagacggaaagaccccgtgaacctttactatagcttgacactgaacattgagccttgatgtgtaggataggtgggaggctttgaagtgtggacgccagtctgcatggagccgaccttgaaataccaccctttaatgtttgatgttctaacgtggacccgtaatccgggttgcggacagtgtctggtgggtagtttgactggggcggtctcctcctaaagagtaacggaggagcacgaaggttggctaatcctggtcggacatcaggaggttagtgcaatggcataagccagcttgactgcgagcgtgacggcgcgagcaggtgcgaaagcaggtcatagtgatccggtggttctgaatggaagggccatcgctcaacggataaaaggtactccggggataacaggctgataccgcccaagagttcatatcgacggcggtgtttggcacctcgatgtcggctcatcacatcctggggctgaagtaggtcccaagggtatggctgttcgccatttaaagtggtacgcgagctgggtttagaacgtcgtgagacagttcggtccctatctgccgtgggcgctggagaactgaggggggctgctcctagtacgagaggaccggagtggacgcatcactggtgttcgggttgtcatgccaatggcactgcccggtagctaaatgcggaagagataagtgctgaaagcatctaagcacgaaacttgccccgagatgagttctccctgagacttagagtctcctgaaggaacgttgaagacgacgacgttgataggccgggtgtgtaagcgcagcgatgcgttgagctaaccggtactaatgaaccgtgaggcttaaccttacaacgccgaagatgttttggcggattgagaagacaacaattttcagctcagattcagagtccgaaggattttacgctgagacaaggcggcaaacgcagcgacggaaggagcatacagaagtatgtgactgacgctcgcaagagcagccaacgccgtatcagtgtaaaagacacaggacggagcacaaagaatttgcctggcggcactagcgcggtggtcccacctgaccccatgccgaactcagaagtgaaacgccgtagcgccgatggtagtgtggggtctccccatgcgagagtagggaactgccaggcatcaaattagaagtatggcattaactttcggggcagttcactactcgacagagagtaggacaaaagcgaaagcttttgaacgttgcgaagcaacggcccgaagggtgaatcacgaagtgattcataaactgccaggcatcaaattaagcagtaaactgatgtaaaaatcagtggttgtaaaagaattcggtggagcggtagttcagttggttagaatacctgcctgtcacgcagggggtcgcgggttcgagtcccgtccgttccgccacttattaagagccctgagcattagctcagggctttttctttccatgtcatttaattattgctcaattcgcaaaaatcctctgcatttctcgctctttttctgcaaagcgctgaaggtcataatcccctcagttaacgaacatagtgattaaaaagaggaattctatgactatccctgcattcggtttaggtacttttcgcctgaaagacgacgtggttatcgcttctgttaaaacggcgcttgaactgggctaccgtgctgtcgacactgcgcaaatctatgataatgaagcggctgttggacaggcgattgctgagagcggcgtaccgcgtaatgagctgtacatcaccaccaagatctggattgaaaaccttagcaaagacaagctaatcccaagcctgaaagagagtctgaaaaaactgcgtaccgattatgtcgatctgacgctgatccactggccatctccgggtgatgccgtgtctgtcgaagaatttatgcaggcattgcttgaagctaaaaaacaagggctgactcgcgaaattggcatttcaaacttcaccattccgttgatggaaaaggctattgccgcggtgggcgcagacaatatcgccaccaaccagattgagctatctccgtatctgcagaatcgtaaggtggttgactgggcgaaagcgcacggtatccacatcacctcttatatgacgctggcatacggtaaggcgctgaaagatgaagtgattgcgcgcattgcggctaaacataatgcgaccccggcgcaggttattctggcatgggcaatgggtgaaggttactccgtgatcccttcatccaccaggcgtgaaaatctggcaagcagcctgctggcgcaggatctgcatctggatgccgaagataaaaatgcgatcgcggcactggactgcaacgatcgtctggttagcccggaaggactggctcctgcctgggattaattacccgatcctttgtacctttacccctctttcacagctcctgcgggagctgttcttatatattcgctcaaaaagtcgataaatgcccgaatacgtgtgctgacggcgcgatcgctgtagtaaacggcgctgaaaggcatttctaccggcagacgtttatcggccagcagttccaccagttctccccgcgcgatctctttatcaatcatataatctgaaagacatgcaatgccgttaccgttcaggcaaagttgttttaacgtttccccgctattggaagaaatcccacatttgatctcatggagctgcccgtcgctacaggcaatcggccaggtattgagcgaaacaggttctgagaaccccagacacagatgccgtttcaactcttcaacggtctcaggcttgccaaagcgggcaatataatccggcgaggcgataatcttgcgatagctggtaaataacgggcgcgcgcgcagacttgaatctgtcaacgtgcctgcgcgtatcgcaacatccacttttcgttcaataagattgatgaacgtttctgaggagacaagagacaacgttatttccggataccgttcacgaaaaggtttaatcagcggcatcaggaaatgcagcattaccggcgttgccgcatcgatacgcagtaagccgcgcggggtattacgcgactccatgatttccgtttctgcggcggccatttcttgcagtatctgctgcacgcgcctgaagtatcgctctccttcttcagtcaggctcagctgtcgggtcgtacgattaagcagactgacgccgagcttcatctccagctttttaactgcccggctgacagcggaattggcctgtccaagctgctctgccgcccggctgaagctgccgctttccacgacagcgacaaaaattgcgagttcttcggaggtggctttcatttttgctcctgaagcaaaattaaattgatattttggctatttttgtcattaaaacatccaggcatactgcgtgtcatctgattactgctgttatggagttatgtatgcctctcgctttatttgcactgacaataagtgctttcgctatcggtacgactgagtttgtgattgtcggcctggtgccgaccattgctcaacaactggctatctcgttaccttccgccggaatgctggtttcaatctatgcgctgggtgtggctattggcgcgccggtgctaaccgcgctgaccggacgcctgccgcgtaaacagttactggtcgcgctgatggtcttgtttacggcggggaatttgctggcatggcaggcaccgggctatatgacattaatcgtcgcccgtctgctgacgggcctggcgcacggcgtgttcttctcgattggatctaccatcgcgacaagtctggtgccaaaagagaaagcggcttctgcgatcgctattatgtttggtggtttaacggtagcgctggtcacgggcgtgccgctgggaacatttatcggtcagcattttggctggcgtgagaccttccttgcggtatcactgttaggcgtgattgcgctgatgagcagtcaattgctgattccggccaatattcccggtcgggcggccgccagcattcgtgaccaggtgaaagtactgactcatcctcgtctgttgctgatttacgccgttacggcgctgggctacggcggggtattcacggcattcaccttcctggcgccaatgatgcaggatctggcgggattctccccggcagcggtaagctggatcttactggggtatggcgtatcagtggctatcggcaatatctggggcggtaaactggctgataagcatggtgccgtgccggcgctgaaattcattttcgccgcgctgtttgttctgcttatggtcttccaggtgacggcctccacgcagtatgctgcgctggctaccatcctagtgatgggggtctttgccttcggtaacgtaccggggttgcaggtctacgtggtacagaaagcggaacaattcacgcctaatgcggtagatgtggcgtcaggtctgaacattgcggcgtttaacattggtattgcgctgggctccgtgattggcgggcaaacggtggagcattacggtttggcgcagacgccgtggattggcgccctcattgttctggtggctttcctgctgatgggtgtcagcggacgtcttgataaacctgtacgcattgctctggagtaaattattgatgtaagcgcctacttacaaaacaaactgcaattgttcgttgaaagtgagtgctaaaatccctataacagaagaaccagtccggttgaggactggttgacgttacagaggtttgaaagtcaaaagtgcgaaaaaacacctatgcgatgcgctatgttgccggacagcccgccgagcggattttgccgccagggtcgtttgcgagcattggccaggcattgcccgccggggaaccgctaagcaatgaagagcggatccgtatcctcgtgtggaatatattcaagcagcagcgagccgaatggttatcggtgctgaagaactacggcaaagatgcgcatctggtcctgttgcaggaggcacagacgacgcctgaactggtacagtttgccaccgctaactatcttgccgccgaccaggttcccgcttttgtactacctcagcatccgtctggcgtcatgacgctttctgccgcccatcctgtttactgctgccctttacgggaaagagaaccgattttacgtttggcgaaatcagccctggtgacggtatatcccttgccggatacccgtttattaatggtagtaaatgttcatgcggtaaattttagtctgggcgtggacgtatacagtaagcagttacttccgatcggcgaccagattgcgcaccatagcggccctgtcattatggcgggtgattttaatgcctggagccgcccacgtatgaatgcgttgtaccgctttgcacgtgagatgtcgctgcgccaggtgcgtttcactgacgatcagcgccgtcgtgcgtttggacgaccgctggattttgttttttatcgtgggttaaacgtgaatgaagcctccgtactggtgacgcgcgcttccgatcacaatccgctactcgttgaattcagtcccggcaaacctgagcaataaaggtgagtcaggtctgccgtggggcaggcctctgcgggtgctgccctctatttttctcataacagaagggcactaccatgacaacgcattcccaccatgacaatgttgaaaagcagtttggttcacaggcgaacgcctatttacatagcgccgttcacgcagcgggtcgtgacttagcgcggctggcgcaaaggttgtctgatttttcccacgcgagcgtactggatatgggatgtggggctggacacgcgagttttgtcgctgcgcaacatgccaactcggtcgtggcatacgatttatccgccagcatgcttgaggttgtcgctggagcggcggaagaaagacatttaagtaatattactctccggcaaggctatgccgaaaaactgccctttgaagatgcatcgtttgaggtggtgattagccgctattccgcgcatcactggcacgacgttggtcaggcattgcgtgaggttaatcgtgtattaaagcccggtggcgtgctgattatcatggatgtcatgtcgcctggacatcctgtacgcgatatctggctgcaaacggtggaggcgttacgcgacacgtcgcatgtccgtaactattccagtggcgaatggctggcgatggtcaataacgcgatgctggtaacgaataccgtgataacagatcgtttatcgctggagtttcgctcatgggtaacgcggatgcgtacgccagcgccgttggttgaggcgattcgattatatcaggcgagcgccccggtagaggtgaagcgttattttgagttgcaggatgacggttcgtttagcagcgatactatcatgctggaagcgcataaagcggtatagcaatttaaaaggcgccgggggaagcggcgccttttggctttttcgtcggacaatatcaggagtctggcgtgctattgtccttcacaaacaacgtaagctgatcgcccggttgtagattatccgtatcatggttccagcgcatcacatctttgatattcaccccgtgacgtctggcgatactggaaagcgaatcgcctttacggacacgataggtaatgctatcgctattgtttgccagtcgttgcgcgctgctgccagcgcccacggtcaggctttgcccgattttcaggcgtgaaccacgcaggttgttccactgctgcaagtccttcgtgcttacgccaagccgcgaagcaataccggaaagcgtatcgccagagcgcaccttatagctacggctattcaacggcgtattgtcggcgatcagttgggactgaacggcgtcaatctcaccggaagccagcgactcacgcaactgctcggcatgctttttgggcaccataacatattgcggaccgcttacgcctaaggtagacccttttacaccggcattaaacgtcttcagcttgctgatagacatgcccgccatatccgcaacctgcgccatttcaactggactgtttaaacgaactcgtgccagcgctcggctttcatctgttgttggcagacgtacgccgtagcgtttgctgtttttgagaatttcactcaatgccagcatcttaggtacgtagagttttgtttctctgggcaaagaaagcgaccagaaatccgtcggttttccacgcgctttgtttgctttaattgcccgcataacacggccttcgccgctgttatacgctgcaacggttaacagccagtcgccgtcaaacattttgttcagacgctgcatcatgtctaacgcggcggtcgtagaggctacaacatcgcgacgcgcgtcataattacgggtctgctttaaaccataattgcgccctgtgctcggtatgatctgccagatgcctgcggcattggcgccagacgttgcgtgaggatcaaaagcgctctccactatgggtagtagtaccagctccataggcatgttacgtttcttaacctgccccgctatccagtacatatacggctctgcccgtaaagttacatcgtggagatagctcttattgcgtaaatacttctgtttctgttcgcgaatccggctgttttccggaattcccatctttagctcgtcgccaatgaaagcccacaagtcctgatctggcgcgatagacgttccgtcgtccatccatcgtgcctgactcgtaaactttcctgcttccccttgaccagctgcagaaaggctctgtgcgtgctgttggacgttgccagtgttctgagacgtctggcaccccacaagcaggacagaggcgagtaatatcgcttttgccttcatgtgtgtgtcaatagttgcttaaaagacgaccgatcataacggcgaagttagcgaatgacaagtaagaattatcagaacgtgtctttctttgaccttaaccatgcaaaacgcgcttctggttgttgcaatattgtttctttgtttatttcgttaattaaatcaatatcttcagttcttaaaaaaagattaatcttacgctcatttttaagaataacgggtaatgtcatttgtttttttacacgtaactctttaactttacgataatattcatttatgaacgaatcgtgcggaagtatgctcaatgcgaacttaatgttagctaaagtgtattcgtgagcgcagcaaatgagcgtgtcgtcaggcagagagttaattttcataagtgactgatacatctgtgatggcgtgccttcaaacagtcgaccacagccgccggaaaacagcgtgtcgccgcagaataagtaagggcggctaaagtaacagacgtgtcctaacgtgtggcccggcgtggcaaaaagagtaaatttctcgcctaaaacgcgaatagtatcgccatcgccaacaagatgggttgctcccttgtcttgcgtttccgccggtccataaaccgtcatttgcgggaagtgttgcaacagctctttgactccgccaacatggtcgtgatggtgatgcgtcaaaaaaatcgcctccggcatccacttatgttcagcaatggcctttaagacgggggccgcttcgccgggatcaacaatcacacagcggccttcatcattggtcagcacccagatgtaattgtcctgaaacgcgggaatactgttaagattcatatattacctctcaaataattagcggaaggttgcgatgaaaccggcaaggctctctcaaactgtcgttgcgcccggatgttggggtgagttgccctggggcaattactaccgtgaggcgctggaacagcagctaaatccgtggtttgcaaaaatgtatggtttccatttgcttaaaatcggtaatttaagcgcagaaatcaattccgaagcgtgcgcggtctcccatcaggtgaatgtttcatcgcaggggtcgccgatgcaggttctggccgatccgctacatcttccttttgcagataaatccgtcgatgtttgtctgctggcgcatactttgccgtggtgtaccgacccgcaccgtttattgcgggaagccgaccgcgtattgattgatgacggttggctggtcattagtggatttaacccgctgagtttgatggggttacgtaaactggtacccgttttacgtaaaacaccgccctataatagtcggatgtttacccttatgcggcaactggactggctgtctttactcaatttcgaagtgctacattatagccgttttcatgtcttaccctggaaaaagcagggggggcggcttttaaatacgcatatcccggcgctgggctgtttacagcttattgtggcccgtaagcggaccatcccgcttacgcttaatccgctgcgacataataaaagtaaaacccctatccgccagaccgttggcgccacccggcaatatcgcaaaccggatggctaagcttccgcctggtagccactatcttcctgcgtgggattcattgccgcggcgcgcgccagttcatcacaacgctcgttttcgggatggcctgcatggcctttgacccatacccatttgatctgatgctgacctaacgcagcatcgagacgtttccagagatcgacattttttacgggtttcttttccgctgttttccagccgcgtttcttccagttatgaatccattgggtaattccttgccgcacatattggctgtcggtgctcaatgttacttcgcaatgttcttttaacgcttcaagcgcgacgatcgccgccatcagttccatacggttattggtggtcagcgtgtaaccttcactaaacgttttttcatgaccgcgatagcgtaagatagcgccataaccaccaggccctggattccccaggcaagagccatcggtgaaaatttctacctgtttaagcatctctggtagacttcctgtaattgaaatcgataacaaaacgcaagtctgacataaatgaccgatatgagcactgcaattacacgacagattgtcctcgataccgaaaccaccggtatgaatcagataggcgcgcactatgaaggtcacaagattattgagatcggtgcggttgaggtgataaaccgtcgtctgaccggcaacaattttcatgtttacctgaagcccgatcgccttgtcgatccagaggcttttggcgtacacggtattgccgatgagtttctgctggataagccggtttttgctgatgtggtcgatgagtttcttgattatatccgcggcgcggagctggtcatccataacgcatcgttcgatatcggctttatggattatgagtttggtctgcttaaacgcgatattcctaaaaccaatactttctgcaaagttaccgacagcctggcgttggcgcggaaaatgttccccggcaagcgtaacagccttgatgcactgtgttcgcgttatgagatagataatagcaaacgtactttgcacggcgcattgctcgatgcccagatccttgctgaagtgtatctggcgatgacgggcggacaaacgtccatgacgtttgcgatggaaggagagacgcaacggcagcaaggtgaggcgaccattcagcgaatcgttcgccaggccagccggttacgggtcgtttttgcctctgaggaagagctggctgcgcatgaatcgaggcttgatctggtgcagaaaaagggcggaagttgcctttggcgggcgtaatttattcctttttaggctataaaaatcatccttcgggcgatttttgcagcaactgattcaaaaggtgagaaaaagcgttgacgggcgacaccgcaaaccgtaatattcgcctcgttcccagcgggaacatcacggagcggtagttcagttggttagaatacctgcctgtcacgcagggggtcgcgggttcgagtcccgtccgttccgccagatacaaatctcagggtgtttttatacatcctgtgaagtaaaaaaaaccgtatcactgtaaaagggatacggttttttttcgtcttcaagaagttccaccgtctatcgtggaatctggcgcaaatgggcctacgcctggatgacgaacaggatattaccgccacttctttcactgtcatggctattttgatcccactgacatttaaggcgcggcctcatggcggtgcttaaccgggatcgggacatgttcagcgcagaagcagactgcgtaatgttgatatcactcagataattacggagaaccgccagacatgcgcatcatcactccagggcatcccacttctccagcaactccaccgggatctcattgatcacctccgagaaccgttttcccaccagtctttcagcctggcgtaacagtgggatggtcgggctactgggttcactgctctcaaaccagcgacgaatgcaccgcaggcgttccagcgcatcattacgatcgcgaattggccccggttcagcattgtgtgggagggatataccgggtggcgcgttgacaggcggcacatcctctgcccgtgccggaacggcattatccataaccgtgcctgcggggtctggcactggcgctggcgacggagggatttccggtgtggttgtctgtaccacgtcaggcagcagcgctaacaactgccgcaggcgtgaaaaatctggagccagatcgcctaatgtctcacgcgcccacacttgcaggcgttctgcgctttcctgcgcttcgcgaaacgccgccagcggtaatgccccacgggcttcgaggtcggccagttgctggcggacggattcgggggccagcgcatcagccgggcggggagcggataacgcgcgctccacatcccgtacctgtaggcgcagggcggcactgtttgacagcgtaataccgcgaatgtccgccatcacgccttcgtgatccagcagcgccgccagggcattactgcgcgccagcgacgcatcttcaatagattctgcggatgcgccttcgccggtaagcagctgtggatggagtgcatcagaccagattacgctcagttctgccagttgtgtgagcatttccgccagtccctgtgcgccagcctgctggatgcgactgcgcagcagcaggatcaacacccggatatccttactgcgcgtgagcagacggcgcgcatcacgttcaatttccggccagttcacggcttccggcgtactgacaaaatcaccatattgcgcctccgcctggggggcggcgcggctgaacagcagcaggtattccggatcgtactccggatcggggccgcagggttgttccgcgcttaccggtttagtcagggacatgtccatatcattactctcagtgggttaagccgtgttcaggttcaaaaatcatgccggtcaccggacggtcatgcatggctttacctgcccaggccgtccagccaagccgctgcgcgccgccgatcaccgcaggcggtgcggcatgaggcttcaactgcagctcaatttcccagcaatattcaaaaccgatgaacgtacgcaccagttctgtcagcacgggcagattgttgccgccgggcagaaaacgcaggtaatcctccagcgtgagcgggccgataattagccggaatttgtactgcatatccggtacggcctggccgataagcgccccgttgcccagcaccgaagactgcgcgggcgtgcccagacgggtgatttcatcgttcgccaccgttatccagtgcagggcgaattctttcaccgcaaaaggtacgctgaaatagtgcgccagcgtggcggccagcccgtcaggattgcgcgattcgcgtaccagatgggcggaggctgccaggcgaacatgatctgacagcgggctttcggcgctttcccgtagatcctgcccgctgagactggcgatataaaacgcaaaacggtcgtgttccggtttgtccagcccgccaccagcggactgggcgctgcgccatgcctgccagaactgcgtcagccagcggtggtgaaaaatattggaaaaatgaaccagcgtcggatcgtgacgactctctgagcggttcagtgccagctcggtatagtgcagcggcaacgggccgtttggcccccatagtccgaggctgtacaggctcaggtgcaggcgtccatcctgccagctgacctgggcgatttcccgtggcgcaaaggtcatcgtcggcgtctgtcccagacggaatttttccatccgtggctgccagatactgcctgccggagtatcacagagctgggcatccacgcgccgcatcaggttcaggaatccgtaacgccagggggttttctgcgcctggttgagagcgccggtcatacgctcccccgttgcccggttctgaccggccaggtcatgacatgcccgcgttgcatcgagtgcagcgtcatctgcgagaaggtattaatggaaacatggcgggcaatatagtgttccagcaccagaccgaacaggtaaggactgataccggaaaatccttcttcgtccacggtcagttcgcaactgacgccccggccatagaccaacaggccggagccgggcaggcggcgggtcaccggggtggttttgcagccaatcaggctgcgcacctggcgcgactgcgggctgtcgtgagccgggataaacagattcagcagatcgcgcagcgcctggccgccggtgcggtgatccagatcggccagcggcagataattaaacgacaactgccggatcagccgccaggccatttcgcgttcagccagcggcggctgcggcgggcgcggcggtctgataagacccacgcccgccaccggaatcgccgcatctacggtcagatcatcccggccattacgtggaataaggcagggcagatcgcggttagtcaccattgccgtgacggtgatatggcgcagattttccgggtagggcgcttcatgctgatcaaccagcgagaggaagacttccgagccggtatagggggttcgggtgccatagcggcgggcgttttctgacgagcggcgcggttcacgacgcagtgaaaaataacgcccgtggttgccttcgtcattattacgggtgtgatacagcggacgaaaaatcatcttccgtgtggtttccgcttccaggccttcgacttcctgaacagaaaacacctcgtaatccagcggacgggtacgatccaccaccagatgctgttccgtcacgctgtgagtgacttcaatccgggtggtggtgcgaggaaacaggttgatcaccggcgtacagaacaggctgaactgtgcagcgtccgtctgatgaatcagccagtccggcggcaggcggttaagcagtatgacaatttccgccacattgccctgcaccttttgtaacccggcagacaatccggtcggggtgaagaagtaaaaccgttccggacaggcgaaaaattcatgcagcagattatggccgtgaaacacgttccaggcgagcggtagcagcccctgccctggctccagcccttcgtgcgccaccgggtgttgaagattcacattcagttcgccgtcaaagtgaccgggttcaccggccagtgtggcgacggcgctggtatgtagcagctcaaacaggtgtgacgcaatgcgttcttcgccgcagaggtaaaagggcagccgtgccggaccggccagctcgctgaaagtcagttccccgaaggttcgcagggtgatgcgcaatgccccggcgacatgaatattaggcggcagatagcggtgcagggcgggcatatccggcggcgcggcggtcaggcgtacctcctcgatggacagcggccacagcgtgacgtcctggctgctgcgaaactggcaggcggtattttcgccttccgggatgggggaaacgaacgcggtatcgcgcggcacggtgacccctttcgccaggtcgccttcctgcgtatcgggatacagctttaccactgccatcgatggcgtgggggtgacgtaattggggctgacgacttccagtaaccgctgtgtgaagcggggaaactcggcgtcaatttttagctgagtgcgggcgctcagaaagctgaacgcctcgatcatgcgttccacatacgggtcggcaatatcggttccctgcatccccagtcgggcggcaattttgggatggagggtggcgaactcagcaccggtctcccgcaggtagctcagttcgcggttgtaatactccagtagccgtggatccatgaataatgccctgtattaaaagaacgtaatgcggctcagctccatatccagcgcgctgcgtaccagaaactccgtgggatacggctgcgtcagaatttgtccgcgaatttcaaactgtagcgtgttatagctaccctgccgggttttatcgagcaagggcgtgaccctgagtgtggcggcgttcagccggggttcgaaacggataatggcgcgccggatcgcctcgctgatatcgtcccacttatgctcatacataaagctgcccgccagcggcggcaggccatagttgagcactgacgccgccgcctgcggatagcgccgggcgtcgatgtcaccctcgtggctaatggtattgagcaaaaaggagagatcccggcgaatgatctccttcagttgtaccggcgtgacgctgatatcccggtcaattttctgatacggagcattgtcacacagccgatcaaacagcgtgggcagcaggtggttagcgggtgtaaaacgagacgtgctcatgcgccatcgttttcctgagcatgaaaggtacaatgggccatgtccagcaggctgatatcgccgtggctggtcagccacactttctgccccagcgcccgcacggtggtttcgccggggccgtcctgccaggcggtttccctgcacagacgcagggcgtcggatgcactttccgaaccgctgtaacgggtaaagagccaggcgccgtgcgtatcgccattcaccagggtgatattaacgggtttccacagcagatcagtcaggcgcgtcggttgcggcgattccagcgagcgtatttgcgaaaacggcagccagatatacacgccgccggtgactagctcaagtaccgggccaaggcgggaatcgctgtcgctcgcccagtcaaatgcgccgccgttccactgcccgcccgtgtctgttatggcttccagtgcggtattacggtgtttatcaacctcaccggtatcgtcatgacaggcgagtgccgccagcagtgactccacccaaacgggctgcggcagaagaaaaccgggtcgttgttcaccctgaaaaacggtgtggcggaacatttcgcagcgaaccagctcccggtacagccgggcctcctgggtataattggcctccatcctggcgcatagctgaagctggtgtagcgcccgcgaccagtctccggccacacacagcaactgaaacaggctgtggcggcagagcgctttcgccggattttcccgaacctgctgctccgccatctgaatcccctccgcaatagagtattcctgtatcagcgcggacagggtagcaggaagcgtgtcagtttttttcatgggcggtatttccatttttctgtgtcggagtgattcggtagtggctatcgatgccaataatacgatgctcgcggcgggtcagatcgggcagtatctcgctatgtgcggttttcccccccagttccggcgagagcagttgcaggatatcgggcattgattccatcgccagccagtgcatttcaccctcaccggtcgtgtccagcgtatccagaatggcatcaataccgggcgcgcctgccaccatatcctgtaacgtgtcggtgtcgccctttttatcgtataacgacgtcaaatcctgggtgacagcgtcttcatttcggggaaacggtttagcacggaggggcttttcctgcccggagggccgcaatgcctgctgatattcctggtaaagctggtgtagtgtgctatccgcttcatggccagtgtaagaggatgcggtttcccggacgggaataatatcgaacgggttctgcggattgagctgttgttgtttaaaccagtccagatccaggtactcagcaacggattcagatgactgaaccaactgaggaaacgaaacatcgggacgggactcatcattggtgcgggcaaggcaccaggatgacagaccccattcaatcgtatctccatcattcagccgcatacggtgatgaggttccatcacctgctcattgacggcacagcacagttcatcagagtgattaacaatccaccacgcctcttcgtggcgaacaagactgagcgcgatatcgtctttcccatgttgctcaaaaagcggaatgtagggggcggcggcagtaaatacgatgtatgtccctgcgggatactgtgcgttatccgttataccctgcgactgtattttccgtaattcccacatgtcttgtttcattatgtcccttaaatgtatttatttttctggaggaaacgtttagggagttttaattcataaataattttaactaaatttatagggagtcattattgatgacaccctttttattattttcgtcgtgaatgcattgttgtatgcatagatgtcttttttgaaatattatttcttttaattctgcaattgcgatttttatcttgctgttcattgattatttaatattaacggcttagttgctaattagtccctgatctgtatcattgttttgtttcgatattttttcgaggctatcaataaagaattgtttatatatttatatgcattgatgcattatttttatgaatttttatgtcacaaggcataacacatggaaactcctgtttcacgcagtgcgttgtatggaaaactggccggcccactattccggtcgctggaatcggcaacggcattttgcaaactacgctctaatccctgggttgagctgactcactggctgcaccagttaacacagcagcccgataacgatattctccacgttcttcggcattaccagatccctctttctgatgtggagaaagcgttactccggcaactggatatgctgcccgccggggccagcgccattagtgatttttctcaccatatcgatctcagcgttgaaaaggcctggatgctggcgagcgtccgttacggcgataacaaaattcgcagcggctggttgctgctggccttgttgaccacgccagaactgcgtcgggtactgagcagtatctgcgcgccgctggccacgcttccggttgatgaactgacggaaatactgccctcgttgatcgaaacatcgccggaagcgcaggagcgcccttacgacggctccggcctggcatcagccattcccggtgaaagcagtcaggcgattcccaacggcgggcaggacggtaaatccgcgctggcaaaatactgtcaggacatgacggcacaggcgcgcgacggcaaaatcgacccggtgacggggcgtgagcatgaaatccgcaccatgacggatattctgctgcgccgtcgccagaataatccactactgactggtgaggcgggcgtcgggaaaacggcggtcgtcgaaggttttgccctcgcgattgcgcagggggaagtgccgcccgcgctgcgggaagtacggctactggcgctggacgttggcgctctgttggccggagccagcatgaaaggcgagtttgaatcgcgtctgaaagggttactggaagaggccgggcgctcgccgcagccggttattctgtttgtcgatgaagttcacactctggtgggcgcgggcggcgcatccggcacgggcgatgccgctaacctgctgaaaccggcgctggcgcgcggcaccctgcggactatcggcgccaccacctggagcgaatacaagcgccatattgagaaagatccggcgctgacccgtcgttttcaggtgttgcagattgccgaaccggaagagatccccgcaatggaaatggtgcgtggtctggtggatacgctggaaaaacaccataacgtactgattctggatgaggcggtacgtgcggcggtacagctttctcaccgctacattcccgcccggcagttgccggataaggccatcagcctgctggataccgccgcggcccgcgtggcgctgacgctgcacacgccgcctgccagcgtacagttcctgcgccagcagctaaaagcggcggaaatggaacggtcgctgttgcagaagcaggaaaaaatggggattcagtcagatgagcggcgcgatgcgctgatggcgcgaattttctcgctcaacaatgaactgactgcatccgaatcccgctggcagcgggagctggaactggtacatacgttgcaggaactgcgtctcgcagagtctgatgctgatgacaaaaccacgctgcaacaggccgaaacggcgctaagggagtggcagggcgacgcgccggtggtgttcccggaagtcagcgcggcggttgtcgcggcgattgtcgccgactggaccggtattcctgctgggcgcatggtgaaagatgaggccagccaggtgctggaactgcctgcccgactggcgcaacgcgttaccgggcaagacggcgcgctggcgcagattggtgaacgtattcagaccgccagggcgggactgggcgatccacgcaaaccggtgggcgtgtttatgctggccgggccgtccggtgtcggtaaaaccgaaaccgcgctggcgctggcggaggctatctacggcggcgagcagaacctggtaaccatcaatatgagcgagttccaggaggctcacaccgtttccacgctgaaaggcgcgccgcccggctatgtgggctatggcgagggtggtgtgctgacggaagcggtgcgtcgccacccctggagcgtagtgctgctcgacgagatcgaaaaagcgcaccatgacgtccacgaactcttctatcaggtgtttgacaagggtgggatggaggacggcgagggtacacatgtcgatttcaaaaacaccacgctattactcaccaccaacgtgggttccgacctcatcagccagatgtgtgaagatccggccttaatgcccgatgctacggggcttaaagaggcgctaatgccggaattgcgcaagcatttcccggcggcatttctgggccgcgtgacggtgatcccttacctgccgctggacgaaacgtcgcgtggcgtgattgcccgtctgcaccttgaccggctggtggcgcggatgagtgaacagcacggcgtgacgctgacgtatagcgaggaactggtcgcacatattgtggcgtgctgtccaatgcatgaaacgggcgcgcggttgctgattggctacatcgaacagcacattctgccacgactgtcgcgctactggttgcaggccatgacggaaaaagccgcgatcaggcagattgatatcggcgttaatggtgatgagcagattgtttttgagatcgtttgctgaaaccggccgttcgaagtgtccgtagtgcgattttaaaaactgtaccggtataccgctccccttgcggcaaccagttgactaaaaaggaaatgaaggattatggctatcaacaatagcgcgcagaaattcatcgcgcgcaaccgcgcgccgcgcgtgcagattgaatatgacgtagagatttacggttccgagaaaaaaatcgagctgccgttcgtgatggcggtgctggccgatctggccgggaaaccgcgtgaagaactgccgccggtgacggatcgcaaattcctcgatattgatattgataacttcaatgagcgcatgaaagccattgcgccgcgcgtggcgttcgctgtgccgaatacgctgacgggtgaaggtcagttgatggtcgatatcacgctggaaaatatggacgacttttcgccggcacagattgcccgcaaggtggacgccctgaaccagttactggaagcccgcactcaactggcgaacctccagacctacatggatggcaaggcgggggcggaaaatctggtcaataaactgttgcaggacccgactctgctgaaaacgctggcgaatgcgccgaaatcggccgctacccagcaagatgtgtcagcggataatgaatcagcggaataacgtcgaatttttaaggaattttcatggcaaacagtaatatgcaggcaaccgacgcggttgctcaggataccgcctccgcatccggtgaatttgatgcgttgctgaatcaggccttccgacccaagactacccaggcggcaaaagccgtggaagccgcggtgcagacgctggcgcaacaggcgctggcgaacacgatcaccgtcagcgatgacgcctataaaagcatcagcgctattattgcgcagatcgactttaaactgaccgaacagatcaaactgatcctgcaacatcccgactggcagaagctggaatcctcgtggcgcggtatggagcatctggtttacaacaccgagaccgacgaaaagctgaaaattcgcttcatgaatctgtcaaaagatgaattgcggcgcaacatgaagcgttacaagggcatcgcctgggatcaaagcccgatgttcaagaaactgtatgaagccgaatacggccagttaggtggcgaaccttatggctgtatcattgcggattactacttcgaccatacaccgcccgatgtggatctgcttggctctatcgccaaagtcgccgcgtcggcccatgcgccgtttattgccggggcttccccctcggtactgcaaatggactcctggcaggaactggcgaatccccgcgacctgaccaaaatcgtcacccagaacctggaatatgcgccgtggaactcgctgcgggctagcgaagactcccgttatattggcctgacgatgccgcgttttcttgcccgcctgccgtatggcgcaaaaaccaacccggtggacgagtttgattttgaagaagatgcggatggttctgaccataccaaatacgtctggagcaacgcggcctacgcgatgggcgtaaacatcaaccgttccttcaaacactacggctggtgtacgttgattcgcggtgtggaatcaggcggtgcggtggaaaatcttccctgccataccttcccgactgacgatggcggcgtggacatgaaatgcccgaccgaaatcgccatctctgaccgccgcgaggctgaactggcgaaaaacggttttatcccgttgatccaccgtaaaaactcagactatgccgcctttatcggcgcacagtcgctgcaaaaaccacaggaatactacgatccggacgcgacggccaacgctaacctgtctgcccgtctaccgtacctgttcgcctgctcgcgcttcgctcacttcctcaaatgtatcgtccgcgacaaaatcggttcctttaaagagcgtgaggatatgcagcgctggctaaatgaatggattatgaattatgtcgacgccgatccggtgaactcctcgcaagaaactaaagcccgtcgtccgctggctgccgctgaagtagtggtggaagaggtcgaaggcaatccaggttattacgacgcgaaattcttcctgcgtccgcatttccagcttgaagggctgacgggatcgctgcgcctggtgacaaaactgccgtcagtgaagcagggcaatgcctgatatatattttgtgaatgtttaagcgagtgaagtcagagaagatagagaatataaagagggatatgaagaaaagaatttcgtctcgcccacggtctcgtaaaggtggggtacgtaatgatgacacatatccgaatgccagtaacaatgccgaagctttttatatcattgagtaggaaatacatattatgaccataagcccaacttttcatctgttacctggtattgttctgctcttttcacaatatgctgtagcctgggaagtcagttgcccggctgttattgatactcagtcttctgctgtgagcctgaagtctgatgtcccagcggcgtggcagctttctccccgatatatgtcgcgtttatggttaagtagtattggggtaacgcagggtaaacctgaaaacctgatggatctcaaaccagagactaaaaaagtaaacggtgaaaattggtctgtatgggaaacagaacgtggtagcgataaagaaaccgatcgctattgggtttcgtgtatttatggtcatgaacagatatggttgacgcaaccaatacctgcttcttctactcgctgtaagactcgtaattttgagggatcgccagaagaccagtctgtatcttttatctgtaattagcgatttgagacgtgaaaatttcagtacaggttatggtttttattatcggaagttatgaagcattatttatatgcattaaataatgcaaattcataaaataactaaatacattatcggtaccggaaaaatatacagtcctctgttctcctgaagttattggagaaggattctgtacggcaatgatttatctataaacaaaaagatatagataaaatcaggtttattttaagtaaaacttaataaggatataaaaatggcttatgacatttttttgaaaattgacggcattgatggcgagtcaatggatgacaaacacaaaaatgaaattgaagtactgagctggcgctggaatattcatcaggaatccaccatgcacgccggtagcggcctcggctccggtaaggtctccgtcaccaacctggattttgatcactatatcgaccgcgccagcccgaacctgttcaaatactgcgcctccggcaagcacattccgcaggccattctggttatgcgtaaggctggcggcaatccgctggagtacctcaagtataccttcaccgacctgattgtcgccgtggtttccccgagcggcagccacgatggtgaaatcgcctcccgtgaaacggtggagctctccttcagcaccgtgaagcaggaatacgtggtgcagaaccagcagggcggcagcggcggcaccatcaccgcaggctacgacttcaaggccaacaaagaaatttaacggctgtttttccggccagatgttatgtctggctggttttattgttttgattttaaaggaatttacagtgaataaatggcgtaaccccactgggtggttatgtgcggtagctatgccttttgcactgctcctgctttccggatgcggcagtagcgattcgctacttgacccctaatcgcagcggcctggcctgagcgtgaaagcgttttacaaggtgaattctgacaatcagaagaaagcggcgtccatgaagatacgtgttgagaattaatgacctacacagaatttttagaggttaagcaaaatgaacagaccttcattcaatgaagcgtggttagcttttaggaaggtgaatcattccgtcgctgatgtgggtagcattattggtggaaacgttgggaaaaatataactggtggttattttcaaaatgcctgccctattcgaatgagctatgttttgaatgcgacagggttcccaatagcccgtaactctccgtatgcaaaggttagtggtgccgataataaattctatatttatcgcgtgaatgatatgattgattatcttactcatactatgggcaagcctgatcttattgttaataatccgaaacagagtgactttatcgggaagaaaggaattatcgtagtaaaagggcatggctggagcaatgccagaggacacgttacattatggaatggcagtatctgttcagatcagtgccacttattaaatgacccagataatggaccatttgttcctgaagttgggacactgtggatactgccgtgaaatggttaatattagttactttcagcataagtggaatgctggtatggcagccatcctttgcacaagaagcattgaccacacaatattcacagtcggaactcttaaaaaattgggcgctgagtcattgtctggcattagtatacaaagatgatgtcgttaaaaacgatgccagagctacggccagtgcttaccttgaatatggtaaacaatctgtggagatttaccatgaaattgatgagattgcgaaaaaatattcagggttgaaatataacggttcgatatcatcagattttaataccatgaagtgcatagattttatccatgacagggaattaaatgaattaattaaaaggcgtgtcgagaagtaaaattcaaagatattaaaagcatacgttctcttgctctgatgaatttatgggtaagaaagagctgtacaggaatagttaatctgttcacctaataaagcagataaatcagggcttaatttaggtagttaaaaggatagtagatatgtcttatgacatttttctgaaaattgacggcattgacggcgagtcaatggatgacaaacacaaaaatgaaattgaagtactgagctggcgctggaatattcatcaggaatccaccatgcacgccggtagcggtctcggttccggtaaggtctccgtcactaatctttcatttgaacattacatcgatcgcgccagcccgaacctgttcaaatactgctcttccggtaagcacattccgcaggccattctggttatgcgtaaggctggcggcaatccgctggagtacctcaagtacactttcacagatctgattattgcaatggtatcgcccagcggaagccagggaggggaaattgcgtctcgcgaatcaattgaactctccttcagcaccgtgaagcaggaatacgtggtgcagaaccagcagggtggcagcggcggcaccatcaccgcaggctacgacttcaaggccaacaaagaaatttaacggctgtttttccggccagatttatatctggccggatttattattttgattttaaaggaatttacagtgaatgaatggcgtaaccccactcggtggttatgtgcggtagctatgccttttgcactgctcctgctttccggatgcggcagtagcgatgcgttacctgacctcgaatcacagcgactcgacctgagcgtgaaagcctccgataaggtgaatcctgacaatcagaagaaggccgcgcccattgagatacgtgtttatgaactgaaaaatgacgccgctttcacgacagctgattactggtcgctccatgacaacgacaaatccgtccttaccgacgatttagtgcgtcgcgacagctttattttgcgtcccggcgaagagaaaaaactgcgtcgcccgctgaatgcgcagaccacggcaatcggcgtactggccggataccgtaacctggccaaatcggtctggcgggtaacctacaaaatcccggaagccccggaaaaagcctggtacagcagcttcatatcggggaaaggaaaagtgcagttggaggcggaactggaacaaagcgccattgtaattacggaacgggataaatgaattatgagctggaatgaccgcgtagtctggagtgaaggacaatttttactgccgcagatgtttcagcagcaagagcgttatctggaacacgtcatgcattaccgcagcctgccgctgaccccctttttctggggattcagccactacaatattgatggcgaagcgctgaacatcggtaaactgatactgaaagaggcatcagggatttttcctgacggcacgccgtttaacgcaccggaccacaccccgctgccgccgccactgaccattctgccggagcacctgaaccagcagatttgtctggcggtaccggtacgcgcgccgaacagcgaagaaaccacgtttgacaataacccggaatcattggcgcgtttctcggtacatgaacacgacatccgcgacgccaactcgctgggacgtggcgcgcagttattacagctcagtcatctgcgcctgcggctgctgccggaaaaggcggtgacgggcgcctggattggcctgccgttgacccgcatcaccgggttgaaccctgacgggcggatagatatcgaccacgacctgatcccgcccatcattaattatcaggccagttcactgatgtgtacctggctgtcgtggatcaacgatctcatccggatgcgggccgattcgctggcggaacggctgaccggcagcgacaaccacggccatgaagcagcggaggtctccgattacctgctgctgcaaattctcaatcgctttgagccgctgctgactcacctggcgaaaaccccgctggccccggaggtgctgtaccgctacctgtccgaactggccggggaactctccacctatgtgcgtccacaaacgcgacggcccgctgaatacaaagagtacaaacacctgacgccctatgccgggttgaaatcgctggttgatgaggtgcagttcctgctgaacgcggtactgatccggggcgcgcagcgcatcgagctgaaagaggggacttacggcatcctgaatgcggtggtggccccttccgatcttgccgatttcagcacgctggtactggcgataaaggcttcaatgccgaccgatgtgctactgcaacattttgccgcccagaccaaaatcgggccatccgatcgcctgccggaactgatccgctcgcatctgccggggctggctttgcaggttctgcctgtaccaccgcgccaaatcccgtttcaggccggatacatctattacgacatccgccgcgagggagcattgtgggaacacattgcccgttacggcgggatggccatgcataccgccggggaatttccggggctggagacagaactgtggggagtgcgcgataaatgacagacagtaccctgacgccgccagcggcggatatgatgtcctttttgtccaccacgccggaacataaggacagtgaatatgaaacgccggtacacaccagccagcgcacggaactcaatgtcatcgttgaagacggtccggacagcaaactccggctggctgaaatcagcgcggcggctaacccgttgctcgccgctgcccggcctttattgtgcgctctcgcagccatgcccgctaaactggatgcggccctggtagagccttaccgtaatctgctggtacgcgagatgcatctgtaccagacattatgcgatcaggcgaacctgcggcgcgagcacgtactggcggtacgttactgcctgtgtacggcgcttgatgaagccgccaataacacaacctggggacggcgcggcgtctgggccggaaaaagcctgctggtaacatttcatggtgaaagcgaaggcgggataaaacttttccagatcatcgggcgtctggcggccagcttccaggagcatggcaacgtactggaggttatctaccacctgctggggttgggatttgaaggccgctacagcgtgcagccagacgggcgtaagcaactggacaatattcgccagcaactgctgacacagctttcacagcgtcgcgatccggttatgcccgcgctctcgcctgactttcagggggcgataagcggacgactgcggcggatgcgccgggtgccggtctggctgagcgccgggatagccctgttggcgatgctgacgctgtttggcctttacagccaccggatggatgtgcagaccgtcaccgtacaacagcatattgatgcgattggtataaaactgccgccgccgcctgtgccggttcataagctgcggctgaaaatcctgctggcaaacgaaatcgcccgtggcctgctgaccgtggacgaagatgaccagcacagtagggtggtcttccgtggcgacgccatgtttgtgccgggacagaaaacggtgagtgacgcaatccggccagtgattaacaaagcggcgcgggaaatcgcccgcgtgggcggcgcagtcactgtaacgggtcacactgacagccagcccattcattcggctgaattcccatccaacctggtactgtcggaaaaacgggcggcggaagttgcggcgttgctgacctccggcggcgtacctgccggacgggtacatatcgtcggcaagggcgatacggtgccggtggcggataacggcagtaaagccgggcgggcgaaaaaccgtcgggtggaaattctggtagtggagtgaatgaatgatgaaaaaatcaacctatgatgtgtctcatcattcggcagtatgtggcgtgacgggggattattatcggatctcagcgacatatcacataacacgatctgttcgtgtttttttgatcatcttatgttgcctgttatccggtggcgcttttgccggatccccgattaacgcaggattcatttcccccgataatgtcaacctcagtactcaggatttcctgaaattttatgccactgacaacgtacagaaaaaagacaatgcactgatgtatatgctgggggtggaggatgcgacagaaggtaaagcctggtgtggatatggtcaggttgacagtataacaataaaccatactgtgctgacctggtttgaacagcacgcagtgaaaaagcctgatgtaagggcttcaatactaatagaggaagcattagttaaaaattttccctgtcagaggacagactcctccataaaaattgcttcccggtcatctcccattttatccctgacgccggatgcgcttaatctttcaggtaatgacttttttaaattttgggtgtctggtaatcaacgggataaactcagggcgggtgtctatctgctcggcgtggaggatgcgacagagaacaaactgtggtgtggatacgctttatttaagacgctaacattaaatgaattagtctatgtttctcttaaaaataaaaccaatgaggaactgaattctcgcgcggctgaacttatcataaataaattaatagagtatccctgtaatatataaaatcattcaagttgcatcaaggcggcaagggagtgaatccccgggagcgtacattagttcgtgactggggtgagcgaggaaagccaacgcacatgcagcctgaagtatgacaggtataccctgtgataatgttatcgctgccagttcagataaagtcttggtggtaaagtcttggtggtaagatattgatatgtttaaggtaatggtctgtctgttggtgggtgttcctgccatttcttatgcgcacgattatgggtgtgctacggttggagcatcaatggagtcatcattatttgatgccataaaaaatgacctgaatatagatgtcgctactattataaaggataaaacaaaggtagagattcttgatatctcacctgtatctaaggtctatgcagaatctctggccaggatggattatgaaaaagataaggccaaaaataaagtggcaatattagataaaaaatcctatttcgatagttactatgaaaatcaggttaaatctatcgtggcaaaatatacctatattaacaaagataaagaaaaagatattttcattgcatccagcttcatgaatgctgatgagtgttctgtaagatttaatggttatattactttatccagggaattttaaaatattgattattgggtggcgagtcgaaatataatgcaaaaatttcttagtctgcttttttcccggcgcgcgctggcagttgtgggcgttctggttctggcgctgctggtctggtttgtcgggccgctggtgtcatttgataccctgcgcccgctggcctccgtgggtagccgggtagtgaccattgccctgttgctgatgctgctggtactgtggctggtcaactggtcgatgagtatcatcggcatcagtgtcctgtgcctggcgattggcttcgtcacaccgctgctggccctgggcgatgtccatccgtttgcgccgctgtgggtccgcctgaccctgattggtttcatcctgctgatgtacgcgctgtacggcctgtaccggctgtggcgtgcgctgcgtatggatgaacaactgctgcgtcgcttcctgcatccgcgcggggaagaggtaccggtggcaggcgagatcaaagccgacctgcgcaccgtcaaccatattgtcacgcaggccatccggcagctgcggcagttgcgggtggatatgcctggctggcgtaaaatcttcgagggaaaacgctttctgtatgagctgccgtggttcatggtggtcggcagtcccggcgacggcaaaaccacggccctgctgaacaccggattgcagttcccgctggcggagcaaatggagcagacttcgcgcatcctgacagtaccgggtggcggcacgctacactgcgactggtggtttaccaacgaagcggtgttgattgataccgccggacgctacgcccgccacgatgacggtggtgaagcgagcgccgcgcagcgtaacgccggagagtggcagggctttctcggtctgctgcgtaaacatcgccccggcgcgccgcttaacggcgtgatcctgacgctaaacgtggcggatttaaccgcacagtcaccggcggaacgcctggcggcctgcgccgctctgcgggcgcgactggcagaactgcgcgagaccctggggattcgctttccggtctatctggtggtcaccaaaatggatttgttgccggggttcagcgaatattttcgcacgctgaccagccatcttcgtgcacaaatctggggcttcacgttgccgtacagccgcaggcgaaaagcgggcgacccgcaggcgctgcacgccgcctgcgcgcaggagctggcgcgcctgacgctgcggttggatcagggactggatacccggttacaggaagagtacgaccttaaaagccgccagcggctgtataccttcccgcgtgagttcgccgccctcggcgagccgttgctggaggctattgaacagatcttcctcgattcaaaattcgatgccacgcaactgaataacacgctgcgcggggtgtttttcaccagcgccgcgcaggcgcaggccgacgccgtggccgaccagttgagtatctggcagcgctttgtccgggcgataaaaaccgcccgtggcgaatcctccgcctctctcccacacgctctgccggacggcaaccgcagctacttcctgcatgacctgctgacacagtttatttttcgtgaagcgcacctggtggagccaaacctccagtgggcctggcgttaccgcctgctgcgcctcggcgggcacctgctggtactggtgctggcattcctgttgtggcaggggatgcagaccagccagcagaccaacggcgactatctgaatgaaatcagcgcccgcgcgacccggctggacggtgatgtgaaagcctacaccggtaaaccggcgatggctcccgtcccggcactgctggacagcgcaagggaactgtccgcctggccggaactggacccggacgcgccgccgctggcctggcgctacggtctgtacagcgtaccgccggtaaccgacagcgtggcgtcgctgtacaaccgtctgctggatcaactgctgctgccgccgctggtgaaacggatggagtatgtgctggcggacgccattgcccgtcaggatagtaaagcggcctacgatgccctgcgcatctatctgctactgaatctggataaagatcacgaagataaatacaacgcggcggagatccagtcgtgggtgattaacgatctggggaacagcgacagcgtggccgggttcggcgggcgcgccgccgtgctgacgcatatcgaagcgctgtttgacggcagccgggtggtgcattcaccgtatgagaaagatgaggcgctgatccgccaggcgcgggcattcctcgacggtcacaccagtaccgagcgtatctacgcgcgggcgctggcggcaatggagagcgaagcgccgcaggagttcacgctggtacgcgccgtcggcgcggatgcgggaacggtctttgtgcgtagcaacggcgcgccgctggatcggggcgtgccgggtatttttacccgtgaaggataccgggagctgttcgacaaacgattaccggaatttgtggcggcggcgacggcgaacgatggctgggtgatgggccgggagagtacgccaaaaaagctgactgacagcctgcgcagccagataccggggcaggagcagtctgtcgcccgcgaagtccgccgtttgtacctgacggaatatgcccgccgctggcaggattttctggacagtatccatagtatcaacagtgccggggaagagggcagttccggcctggcctatgatttacaggtgctgcgcaccctggcgtcgccggactcaccgctgatgcggctgggaaaagcggtggtggagcagaccacgctggtgccgccgccggacccgcaggccagacagaaacaactggcgcagcgcgcatccggtaacgcggggaaagtggtacagacggcaaaactgttccaggatattcacccggaagaacggctggaaaaaacgctggtggatgatcgtttcgccgcgctgcgcgaggtcattgccgggcggacggacggcggacagagcggcggtgggacgatgcagatcgcttcgctgctgaccatgctcaacgagtattacacccaactgaccattgctgatagcgcgctggcggcggggacgttgccagcgcgcattactgccgcagacaagttgcaactggaggcggcgaaactgcccgcgccgctgaaaaacatcctgctggatctgacgaagcagggaacgcgcaaaatcaacgccgggaccggcgacgtgctgaacacccagatggaggcgatgatgggcgacgactgccgtgacgccatcgacgggcgctatccgttcgccgacagtccgcaggaggtcagcgccgaggactttaaccgcatcttcgccagcggcggcgtactggatgctttctggagcaaacaactggctccgctggcggacaccgccagcgacccgtggcgctacaaaccgaccgaaggcaacatgacattgcaggggccggatctgacgccgtttcagcaggcgaagcagatccgcagcgtattttttaacagcgagggcgggaaaaaattttcctggtcgatgcagattagcgtggtggatatggacccggccatcatggaactggtgattgatatcgacggccaggtgctgcgctacgcccatggtccggaccgtcccctgaaagtaacgtggccgggaccgcgcaacggctcgatggcggaaatcaccgccagcccgcgtattcgccaggacacctcaacgctactgaccggcgggccgtgggcgctgtttcatctgctggacgccggaatggtacaggaaacggcggtgcgggggcgtcaactggtggaatatgattttgacggtcgccgggtggtgctggaaatcaccgccgggcgggattttaacccggtcagccgggagctgttgcagaacttcagttgcccggcgagggcgctgtaatgcgccggccagcagtggtatcagccccggcgatgttcggcaggctgccggaccagcgcgactatgtgcgctggcgagtgggcgctgaagagggacgaatatggcaggactggctgaaccgccagacgtgggtgggcagcgggcggcatatcgtgttgccgggaggccagacgaccgatgaagagcgtgacggctggatgcacctgtcgccgcgtggcgaacatgatatgcccgcgccggaacaccatccgctgccgtggagctttgtgatgtcgccgggatttttgccgatgggtgggacgactgactggctgaccggagtgctgatggcgtcacgggatagcgtgggacgcccgtggccgctggtgatttaccagcgctgcggtcgggagtggctggacgagagtttgcaggagacgcagggctggctgtactggctggcgaggctggcggcgcagcatatcacgccggacacgatgcggcgcgggcggctgaccgagcaggtggaccagctatgggcgatgtggcagccggggccgtggtgggcgcagtggctgcgtgggttacgacgtacatcgcaacgcagccgggaactgaccgggctgccggatgaagcaccggtagtagaactgccgggcgtgcgttatctgccgtggccgggctggccgggtaagacgctggggcaggcaacaccggggcaaggctggttctggcagcagaacagtgaagggcggtatgtggatgcgctgcggttggtggatgaaaaaaatagaggtcagatgctgtgaaaaagtacgctgtagaggttctgtttatgtctgcctgtgcaggaatgttcctgcccgtatttgcctggggcggaacagatgtaaacattgataacccgctggcggagtgtgtggatatccatcccgttcatcgtcaggaaatggataaccttaccattctgaaaacaacggtcacactgaaaaaaagcaccggtgaatgtggctgtttctcaacattaatcaactataccagcttactggcgcaggatgttgagggttacggacgcggaagtgcatattcccttcaggaggggaatatctcactggcgaagatgcagggacgttatcctttcagctttgtattatcggtggataaccagtctgtacgggatcagaagctggcgctaatgatacgttgtacaccaccgctgtaatacacagaatagtcagggagaagatgatggcagtaagactgacttttgacgggcaaaagctgacatggcctggtatcgggatatttaaggcgaccacggggttaccggatttacagtggccagataaacagtgtgtgccggatgcggcgataccggaagggaattataaattgtttattcagtttcagggggaggcaccgataagaaatgctgcggattgtgatctgggaccatcatggggctggagtaccattccgcgaggccaggctgccggaacatgtgagatatactgggcgaactggggatataatcgtatccggctggaatcagcggatgagaagacccgaaaagcctgtgggggcaagcggggtggtttttatatccatgattccaccaaaggttacagtcatggttgtattgaagtggaaccggtgtttttccgtattctgaaacaggagacggaaaaagaaaatggtgaaaagacatttacggttaatgttaagtatgtttctggtcagcaaacgaatggtggaacaaaacaataataccgttaaaaccggatgaaattatcgtgtctggacgtgctgtggttgacaatgattacaatggtggccagataagtaatgagcaccaatgataaagtatatgactggcggtgtgctggttattaatcaaatttctataaaatgcaatgcgaatctggtaagcgtaataaaaataaaatcataatattgttatgttcatttccttatttatgtaattcagtatttatgttatgtgctaatttttgtgtttttattttcatggctcttgtcagcaatataccctgttcttctggtaaatatttaaatataacaggctggttgcattataaagtgcggggcactgtttcctgacggtgagtctatttattttaatccggtattaaaggagtcactaccatgagttttgtatccacaaataataaatccggtatgggagggctgacgacaaccacgccgccgataaccggagaaagtggcggtgtcaccgcagattcagtcgccggaagcgtggcagatgcggcggaatccgccgtggaacaggctgcgggatcgctatttggcgcattgccggagccatcaggactggtgaaagccgcggtagcagcggcgcaggctgccgccgccgcaggtatggcgcaggatgcggtatcggccatcgtctctgctgttgcaggcgggccgggggcgcataatgtgacggtcagcggcagcgccgtaccgccgggcgcattactgttcgccagcctggacggcggcgaaacattaagtgaactgttcagctatgtggtacagctaaaaacgcccgacaccctgaatctgggctatgtctccccggcggccaacctgccgctcaaaccgatggtgggcaaagatctgtgcgtcaacatcgaactggatggtggcggtaaacgacatatcagcgggctggtcacggcggcgcgggtggtgggccatgaagggcgttcggttacctatgagctgcgtatggagccgtgggtaaaactgctgacccataccagcgactacaaagcattccagaataaaaccgtggtggatattctggatgaggttctggcggaatatccctacccggtggaaaagcggctggtggaaagctacccggtacgcacctggcaggtgcagtacggtgaaactgattttgattttcttcagcgactgatgcaggagtggggcatctactggtggtttgagcacagcgaggacagccacacgctggtgctggcggatgccatcagcgcccacaaagcatgtccggactcgccgctggtcgagtggcaccaggaagggctgaagctggacaaggagtttatccacactatcacggcaaacgagagcctgcggactggacagtgggtgctggatgatttcgattttacgaagccacgttcattgctggcaaacaccgtggcaaacccgcgtgaaaccggtcatgccacctacgagcattatgagtggccgggagactacttcgacaagagtgaaggcgagatgctgacgcgcattcgtatggaagcgcagcgcagccccggcagtcgggtgctggggggagggaatatccgcacactcatgaccggttataccttcacgctggaaaactatcccaccgccgaagtcaatcaggaatatctgctgatgcagaccttgctgtttgtgcaggacaacgcgcagcacagcgggcaggaccagcactttaccttttccacccgttttgaactgcaccccacccgcgaggtgttccgcccgcagcggacggtgagcaaaccccacaccaaagggccgcagagcgccatcgtcaccggcccggcgggccaggaaatctggacggatcagtacgggcgggtaaaggtacagtttggttgggatcgctacggcaaaatggatgaaaacagctcctgctggatacgcgtcagctacccgtgggcgggcaaaggcttcgggatgatccagatcccgcgtatcggccaggaagtgctggtggatttcaaaaacggcgatccggatctgccgatcatcgtggggcgtacctacaaccaggacaccatgccgccgtggggactgccgggaatggcgtcgcagagcgggatcttcagccactcgctgtatggcgggccaacgaacggcaacatgctgcgttttgacgacaaaacgggcgcggaggaagtgaagttccacgcggaaaaagatctcaacaccacggtgaagaataatgaaacgcatacggttatggtggatcgcactaaaaccattattaaaaatgaaaccaacagtattggtgaggacagaaacaccacggtaacgaagaatgacggcctttccgtaaaactggcgcagacgatcaatatcggcaccacttatcgtttagatgttggcgatcaattcacgcttcgctgcggcaatgcggcgcttgttttacataaggacggctccattgagttttgtggcaagcaactgatgttacataccagcgatgtcatgcaactgattggtaaaggtattgatatgaacccggatggcggcacagccgtaaccgccgatgatattgccccccttctcacctctgagtgatctgaattaaacctggagttctcatggatcgaccataccgcatacaggaagggtgttttgtcctgcctgaaacatttacggatcgcagcgtcaatatttttatcctggagggcaatgaacgaacatcgcccagcctgaatatttcccgcgatacgctaaaacctgatgaagacctgcccgcctatattgaccgccagattgcactgatgaaaaaaaatctcggtcagcaccgggtattgtcgcgagcgcctgcacaggcaggaacgggcaatgatgcccttatgggggaacaaattgccgccacccataaatccgggaaaacggaagtgtaccagcgtcaggccgggtttattgcaacccctggcaaggtactggtcttcaccctgaccagtccccgtccttttgatgataaagcagacctactctggaacacctggctggcaggctttcagccggataaaaacgaataatcacacggaggtgtgaccatgtatgaagcagcccgtgtggatgatcctatctaccacaccagcgcgctcgccgggtttcttatcggcgctatcatcggcatcgccattatcgcgcttgccgcctttgccttctttagctgcggttttcttgccgggctgattctgggttttatggccgatcaaatagcctccggggtattgcaactgggcgaggccatcgggcgctccatccaccacacggcaggaaaaatcctcaccggttcggagaatgtcagcaccaacagtcgcccggcggcgcgcgcggtactgagtacggtgaaatgcgataaccatatcgcagaaaaacgcatcgcccaagggtcggaaaatatctacatcaacagccagcccgccgcccgtaaggatgaccacaccgaatgcgacgcggtgattgaagacggttcgccgaatgtgtttctcggcggcggcacacagacggtactggaaatcagttctgaaattccggactggctgcgcaaggtggtggatgtattgtttgtcgtggcgagtctgctcggcgggctggccggggcgtggcggcaggcggcaaagctggggacgaaatttggcactaaatgtgccgctaagtttatcggcggggagcttgtcgggatggccgtgggtgaggctatcagcgggctgttcagcaatccggtggatgtgaccaccgggcagaaaatcctgctgccggaaacggacttcaccctgcccggtcgcctgccggtcacctgctcgcgtttttacgccagccacctggaaactgtgggactgttgggacggggctggcggctgaactgggaaaccagcctgcgcgatgacgatgaacacatcacgctgaccggcgtacaggggcgggaactgcgttacccgaaaacgatgctgacgcccggccaccagatatttgacccggaagaacagttatacctcagccgcctgcatgacgggcgttacgtgctgcattacaccgatcgcagctattacgtatttggtgattttgacagtgacggcatggcatacctgctgtttatggagacgccgcaccgccagcgcattgtcttcgggcacgaaggaggcagactggtacggatagcctccagcagcgggcatcacctgttactgcaccgcacacagaccccggcaggggagcggctgtcgcgaattgaactggtgcagggcggcacccgtggcaatctggtggagtaccggtatgacgataacggtcaactgaccggcgtggtgaaccgggcgggaacgcaggtgcgtcagtttgcttatgaaaacgggctgatgacggcgcacagcaatgcgacggggttcacctgccgctaccgctggcaggaactcgacggcgcgccgcgcgtgacggagcacgacaccagtgacggcgaacattaccgctttgactatgattttgccgcaggcaccaccaccgtcaccggcaggcagggggagacatggcagtggtggtacgacagggaaacgtatatcaccgcgcaccggacgccgggcggtggaatgtaccgcttcacgtacaacgaagaccacttccctgtcaacattgagctgcccggcggtcgcacggtggcgtatgaatatgacatccagaaccgggtggtgaagacgacagatccggaaggccgggtgacgcagacgcagtggaacggcgagttcgacgaaatcacgcgcacggcgctggacgatgacgctgtctggaaaacgcagtacaacgcccacggccagccagtgcaggagacggacccggaagggcgggtgacgcagtacgcttacgatgaacaggggcagatgtgcagccggacggatgcggcgggcggcacggtggtgacggcgttcgacagccgggggcagatgacgcggtacaccgactgttcagggcgcagcacaggatatgaccacgatgaggacggcaacctgacgcgggtgacggacgcggaagggaaggtggtacgcatcagctacaaccgacttgggttgccggagacggtaaactcaccggggaaacagcaggacaggtatacctggaatgcgctggggctgatgagcagccaccggcgcatcacggggagcgtggagagctggcggtatacgccgcgcggtctgctggcggcgcacacggatgaggagaagcgcgagacgcgctggcagtacacgccggaaggccgggtggcagcgctgaccaacggcaacggggcgcagtaccggttcagtcacgatgcggacggcaggctggtgcgtgaggttcgcccggacggactgagccgtacttttatcctggacgacagcggttatctgacggcgatacagaccacgggcacgcagggcggcgtgcggcgggagacgcagcagcgggatgcgctgggccgtctgttacggacggagaatgaacacggccagcggacgttcagctacaaccggctggaccagataacggcagtgacgctcacgcccacggaggcggggcaacagcagcaccggatgcaggccgacacggtgcgttttgagtatgaccgcagcggctggctgacggcggagcacgcggggaacggtagcatatgttatcagcgcgacgcgctgggcaacccgacggacatcacgctgccggacgggcagcacctgacgcatctgtattacgggagcgggcatctgttacagacggcgctggacggcctgacggtgagcgagtatgagcgcgacagcctgcaccgtcagataatgcgcacgcaggggcagcttgcgacgtacagcggctatgacgacgacgggctgctgagctggcagcgcagtctggcgtccggcagtgcccctgttcttcctggccagcgcccggcgcggcagggctgcgtgacgtcgagggactattactggaacaaccacggcgaggtgggcacgattgacgacggcctgcgtggcagcgtggtgtacagctatgacagaagcggttacctgaccgggcgctcaggtcagatgtatgaccatgaccgttattattacgataaggcgggcaacctgctggataacgaagggcagggagcggtgatgagcaaccggctgccgggctgtggtcgtgaccgttacggctataacgagtggggcgagctgaccacgcggcgcgaccagcaactggagtggaacgcgcaggggcagctgacgcgggtcatcagcggcaacacggagacgcactacggctacgatgcgctggggaggcgaacccgcaaggcgacgtacgggcggcacacgggccatacggcgcggagccggacggactttgtgtgggaggggttcaggctgttgcaggagaacgtgcagcagcagggctggcggacctatctgtacgatgcggaacagccgtacacgccggtggcgagcgtgacggggcggggagaaagcaggcaggtgtggtattaccacacggatgtgacgggcacgccgcaggaggtgacggcggcggacggaacgctggtgtgggcggggtatatcagggggtttggagagaatgcggcggacatcagcaacagcggggcgtactttcaccagccgctgcggctgccggggcagtattttgacgacgagacagggctgcattacaatctgttcagatattatgcaccggagtgtggacggtttgtcagtcaggatccgatcgggctgaggggcgggttaaacctttatcagtatgcgccaaatcctctcaaatatatagacccacttggtttaaccgcgactgttgggcgatggatggggcctgcggaatatcagcaaatgcttgatactgggacagtagtacaaagttcaacagggacaactcatgttgcctaccctgctgatatagatgcttttggtaagcaagcaaaaaatggtgctatgtatgttgaatttgatgtgcctgaaaaatcattagtacctacaaatgaaggatgggcaaaaatagtagggccagattctatcgaagggcgattagctaaacgcaaaggtttgcctgttcctgaaatgccaacagcagaaaacataactgtaaggggcgagaaaattaatggggaagttgaagcaaaatgctaaataaatttaaattgtgggtgagcaaacatactgattatacggtaattcataatgaaaatgatttatcttacagtattattatagattttgaagatgaccggtatatatcaagatttactgtatgggatgacctaagctgtatgtcagaagtaatggatgtggatactggtttatataaattaaacaagagaaacgaattttctacatttgatgaacttctggatatatttgatgattttatgataagtattaaataatagttggccgggtaagaagttaactcttcccggctgttttattatctaacccccatcaatccggagacgcgctaccggtacgatgcgctgggcaggcgggtgagcaaggcgacgtacgggcggcacacgggccatacggcgcggagccggacggactttgtgtgggaggggttcaggctgttgcaggagaacgtgcagcagcagggctggcggacatatctgtacgatgcggaacagccgtacacgccggtggcgagcgtgacgggaaagggagaaagcaggcaggtgtggtattaccacacggacgtgacgggcacgccgcaggaggtgacggcggcggacggaacgctggtgtgggcggggtatatcaaggggtttggagaaaatgcggcggacatcagcaacagcggggcgtactttcaccagccgctgcggctgccggggcagtattttgacgacgagacagggctgcattacaatctgttcagatattatgcaccggagtgtggacggttcgtcagtcaggatccgattgggctggcgggggggctgaatctttaccagtatgcgcctaatccgattagatggatcgatcctttaggacttgctatcctggagcatcaatctaattttgatgcggcaaggagaaccggatttgaaaatgcgggtatgacaaaccctgaggatgtcactttctcgaaagtcgatcccaaaactggtactgttgttgagtttaaaggtccaaatggggctaaagttgcttatgatgcacctcatgcagatatggatgtgacagcagggcatgataaaccacatgttggttggcaatccgcaggaaaaagaggttccggaggagctaatagaggtaatattacttatgatggcccacaacatccgcatcgctctgactctaagggagatgataaatgttaaattcaaatatgtctgaacttagaatcgaactggagaatgcgattaaaaatctcggtattcatgattatcgtgtcgataaacccgaacaaatcgtttctgagataaaagagatatatgttaatggtaatcctagaacctggtggttatcattaaaacatagacaatatgtcttttcttataccgataattctggatataaaaacatatcacaaatagtaagtaaacaactcaatgaaagcaatgtaatcaacaaacatatatttttgattgctgatgaagataatgagcaaatatatgtatataacgttcctcttaactccctgcctgaaattatagaaaattgcagatattttgaatattatgttgcagatcatgaactatcttggcttatatgtgaaaatgatcatggtgatttgattgtatgctcaaccattaagtaaagcgcgagtgctctttagcgatatagttgcccatatttaggcgttactagccgaagatggcgcgattgtctggcaggggaaacagcaattctgaggtcaggaagatagcataacccattaaccgggatagatccgctagacctgaatccagttgatgcgacaggttatagggtttatggttatttgctcctggagcaaataaaccttattacattggtattactaatgatatggtttgacgaagggccgagcattaaagcactggcaggttatcaaaagaaaatggaaggatgctgccatttgatgaaaatgtaatctaatggaaagtcagaggttacgagaaatattatatagagaaatataaaaccagaaccggaaccataggtgaaaaaattccctcaacaaatagagagaataaatataattcatttgatcatgggcgaacagatcccagcgcacaagcatttaaagactcttaaaatagtaagggagttggttccggtggaggaaaatgcggatgagtgattaagaattttggggctgtgataagaagtcgagaacaatgctgcgttttgtgaagcccggagacatattttgttttaaattagatgaagatagatattgttttgggcgaattataacactaatgactgtcggacatctttctgaattatttgatataattaaaaaaccccctggaataacagagttagaaattagtaatgcaaggcgaattattgaaccaattatagtggatacatattctttatttgataagaaattagaaaatggaagtgactggagaattattggtcatcaggttaattacaatccaaaaaatttagatggtatctattttgcacttggaataggtgattcctgtaaaaagaaagactgttacggaaatgattttctcatttcagaaagtgagtggaaaacacttcctaaattatctcctaaagggggttttgatatcaaaaaacggcttgaaattgcctgaaaatgaaaataaaaagccgggaaagatcttttgtcttcccggattttattatttaatccccgttcaccacattatttacccccgccttaatatgcttcatcgactttttcacctgataaagctccttccgtagatccctcacttcgtccgtctctgcaatcaggatcaaacacccctcggagatcttcacggtgacgccgtgcccggtctcaaatcccgcttcttcctgccagtcacccttaaggtgctggctggggatttgtgagtaacaggcggtcatgcaggtttcgctgttgatatggcggacgctgacgccggaggcattcatatttgctgactaaataaattcttatttatccgccggatgctggctgattgtggagctcagggtgagtgagtatgggcgcgacatcctggcaccgcgcctccctctccccggccagccccggccggtgatgagcagccggctgccggggccgtattttgacgatgaaacgggcctgcattaaaatctgttcagatattatgtaccggagtgtggctggttcgtcagtcaggatccaatagggctgaaagggggatggaaccgatatcattctccgctgaatcctattacagatagtgatcctcttggccttattacttgtggtgctgatagaggtgattctggcaagttattaagatgaaaaatggttgaaaataattgcgttagtgaatgctcatttatgcctttacctacaaaaagtaacggatttgcttgctggaattgtgttaacgaatgcaaataaaatcaatgctgttgatgtttttactacaggaataagtatggttaacgataaggatacagctatattaattagtgatttaatgttgagattcggtaaggagcttgatgaatctgttgctgttgttcagtcccgttgtgatgaggatgaatttaatgtatatcgagaaacggttggttttatcatgggtgaaatgcttattaaaataatgaatccattatatgaaaaacatccagaaataaaaccaaaaggattgaaacaaaacatctggaaccggatgaataatgtgtaaaagccggaggggttatcttttcccggctttttattatcaattactcattaactcctgttccgttcttttgcgtttaatcaccggaatatctccggtattgttcagcgccccggaaatgtttttaaccactgttctgcactccgtttattaatgcgggttacgcccatcccttcaatacagccaaagagtccgtgggtatgctgcggcgtgatcacgatgcaatccctcattacccgcaccttgacgggcatcccgttaataaaccccgcctgcggcatccattcaccgtacaaacgaactgaaagtctctcaacgcgtgagtatgtaagtatcccgcataatcgagccattcacatttagagatcatccgacataatcaatctgccaacgcaggagatcgctatgcgtaaagcccgtattactgcgcaccagatcatcgctgtgattagatcagtcgaatccggacggactgttaaagatgtctaccgggaggccggtatttctgaagccaccagggacaactggaggtctggatacggcggcagggatacgcgtggaatcacaaaaggctccaccgtatttactgtctgctcaagctgaattttcgccgtaagggtaaacaacggctgccggtacgcaatccctcgccactggtcacgccggaagcgctgaaccagagctggtctgtgggcgtcgttttcgcacgttcaatgttgttgatgactgtaatcgtgaagcgttgtcgattgaaatcgatctgaatctgccagctctgcgagtggtccgtgtactcgacaggattacagcaaccgcggttatctggccatgctgcgtatggataagggaccggaatttatctcgctggcactggctgaatgggcaaagaaacatgcagtaaagctggcgtttatccagccgggtaagccgaagaaaaacgttttcatcacgcgctttaaccggacataccgtacagaaatactcaattcttatctgttcagaacgctgaatgaggtgtgggaaattacggataaagggttatcagaatataactgcgaacgtccacatgaatcgcggaacaatatgataccgaaggaataccgccaataacgttatctggccggaatcttaaaaatgcatggaactaaaacgggtctatttacaggggcacctgcgatgaatttcgctgcactgaaaagcgataccggatgagagctgcttcaaattaatgtgccatgttcacggggaggttgtgcgacgtttgcataatccagcaagaactgaaaggaaggggagagctttttcatgcctgtataatcagtctggcctgtgtcagtcagctcttagtgttgagactctcgttggagcgttataattgcttttccgtttcggaaaacaagattttccattaaagatcttccctgcgaggaaaagttaactaataattttaccgtcgagttaggagatgtatgtttaaatataaacaatgttgcaacgatgcctgataattatcctctcttcgaagataagtttcccacacccagtgtagtaggtgtcatggtaatgttatcacttgaatgtaaatggaaggtataattgctttttgactggcattctattccaccctgacaacacgatgttaacatcaacactgtttatattggcaataacgcaatttttttcagattaagaggtgctctgatatatagatttttatgacattacttatttgaattggtaacaaataccaataagtacaagctgttattaccagccacggattttttacatacggtaagatttggtatggcgttatgtattctggatgtgctggattattttaatttggtttaaaaaaggtggttattcaaatgaaaagcataaaaaaattgattatcgcaagtgcgttgagcatgatggctgctagttgttatgctggctcatttttgccgaactcagagcaacaaaaatcagtggatattgtgttttcctctccccaagatttaaccgtatcgcttattccagtgtcgggcttaaaggctgggaaaaatgctcctagcgcgaaaattgcgaagcttgtagttaattctactactcttaaagaattcggggtcagggggatttctaacaacgtggtagacagtactggcactgcatggcgtgtagctggtaaaaatactggtaaagagatcggtgtgggcttatcaagtgacagtcttagaagatctgatagcacggaaaaatggaatggggtgaactggatgacctttaatagcaatgacacacttgatattgtcctgacaggaccggcgcagaatgtcacagctgacacgtacccaataactttagacgtagtgggatatcaaccttaatagtaaacaactattagtgtattgtgccttgtttaaggcgcaatacacatcaaatcatctatttttcttttacaatttttgatatgaaaatagttaattttgctgtaatggcggtagctttgttcgccactaattctatggtttcagtatatgccgtcaaccagcaattaaattcagccactaaattattcagcgtgaagctgggggctacacgagtgatttatcacgctggtacggctggagcgacgctctcggtgagcaacccgcagaattaccctattttggttcagtcttcagtcaaagcagcagacaaaagttcgcctgctccctttttggtgatgccgcctctatttcgtttagaagcaaaccagcagagtcaactgcgtattgtccgtactggtggtgacatgccaacggatcgtgagactttacagtgggtctgtataaaggcggtaccacccgaaaatgaaccgtcggatacacaggctaagggcgcgacccttgacctcaatttgtccatcaacgcctgtgataagctgattttccgcccggatgccgtgaaggggacgccggaagatgttgcaggaaatttaagatgggtggagacgggcaacaaacttaaggtggagaaccccaccccgttttacatgaatttagcctctgtcacagtagggggaaagcccattacagggcttgagtatgtccccccctttgctgacaaaacactaaatatgccaggtagtgcccatggtgatatcgagtggagagttattacagactttggtggtgaaagtcatccgttccactacgttcttaaataaatccaggggcttagcggcagaaaatgaagttcaaacaacctgccttgctactgttcatcgcgggagtggttcattgcgcaaatgcgcacacttacacattcgatgcatcaatgttgggcgatgcagcgaaaggggttgatatgtcgctctttaaccagggggtacaacagccagggacttatcgcgtggacgtgatggtgaatggtaaacgtgtcgacacccgtgatgtggtgttcaaattggaaaaggatgggcaaggaacgcctgttctggctccttgtttgacggtcagtcagctttcacgctacggcgtaaaaacggaagattaccctcagttgtggaaagcagcaaagcccccagatgagtgtgcggatctgaccgccattccacaggctaaagcggtactggatatcaataatcagcaactgcaactgagtattccgcagttggcgttgcgtccggaatttaaggggatcgctccagaagatctttgggatgatggtattccggcgtttctgatgaactacagtgcgaggacaacgcagacggattacaaaatggatatggtggggcgtgacaactcttcctgggtacaactgcaaccgggaatcaatataggtgcgtggcgtgtccgcaatgcgaccagctggcagcggagtagtcaactgtcggggaagtggcaggcagcatatacctatgctgagcgtggactgtactcactaaaaagtcgtctgactctggggcaaaagacttcgcagggggagatatttgatagtgtgccatttaccggtgtgatgttggcatcggatgacaacatggtgccctacagtgagcggcagtttgctccggtagtgcgtgggattgcccgcacgcaggctcgggtggaggtcaaacagaatggttacaccatttacaacaccactgtggcgcccggaccgtttgcactgcgggatctgtcggtaacagacagtagtggtgatctgcatgtcaccgtgtgggaggccgatggcagtacacaaatgtttgtggtgccgtatcagaccccggcgatagcactgcaccagggatatttgaagtacagcctgttggcgggccgataccgatcgtcagactctgcaacggataaggcgcagatcgcgcaggctacgttgatgtatggtctgccgtggaatctcactgcatacggcggtatacagagtgcaacgcactatcaagctgcattgcttggtttggggggatctctcgggcggtgggggagtttatctgtcgatggaagcgacacacacagtcagcgtcagggggaggcggtacagcaaggagcctcctggcgactgcgttacagcaaccagctgactgcgacggggacaaatttttttctgacgagatggcagtatgcctcgcagggctataacaccctatccgatgtgctcgacagttatcgacataatggcaaccgtctatggtcgtggcgggaaaatttgcagccgagctcgcgtactaccctgatgttgagtcagtcatgggggaggcatttgggcaatctgagtttaaccggttcccgtaccgactggcgtaatcgccccggtcatgatgacagctacggactgagttggggaacctctatcggagggggctcgctgtcattgaactggaatcaaaacagaacgctgtggcgcaatggcgcgcaccgtaaagagaacataaccagcctgtggttcagtatgccattaagccgctggacggggaataatgtaagtgctagttggcagatgacttcaccatcacacggtggtcagacgcaacaagtgggggtcaacggagaggcattcagtcagcaactggattgggaggtgcgtcagagttaccgtgccgatgccccgccaggtggtggtaataacagcgcattgcacttggcatggaatggggattacggcctgttaggtggtgactatagctacagccgggcgatgcgccagatgggagtcaatatcgcgggaggtatagttatccaccatcatggtgtgacgctggggcaacctttgcaaggctcagtggcgctggttgaagcgccaggggcctcgggggtgccagttggcggctggcctggcgttaagacggattttcgtggcgacaccacagtgggcaacctgaacgtctatcaggagaatacagtcagcctcgatccgtcgcgactaccggatgacgcagaggtcacacaaaccgatgtgcgcgtggtgccaaccgaaggggcggtggtggaagcgaagtttcacactcgcatcggggccagggcactgatgacgctgaaacgggaagatggtagcgccattcctttcggggcgcaggttacagtcaatgggcaggatggcagtgctgctctggtggatactgatagccaggtttatctcactggtttggcggataagggcgaactgacggtgaaatggggagcacagcaatgtcgggttaactaccgcctacctgcccacaagggaatcgcgggcttgtatcaaatgagcggtctctgcagatagccgattctgaaggagagaataatgtggatgaaaatacagcgagtgaaaacggttatctatagcgtaagcttactggtcgctgccagtagcttggtgccgatagcgaacgccgcagaaaaacttcagacaacgctacgtgtaggtacttactttcgggctgggcacgtgccagatgggatggtgcttgcgcaaggctgggtgacttatcacggcagtcacagcgggtttcgggtatggagcgatgagcaaaaggcgggtaacacgcctaccgtattgctgctgagcgggcaacaggatcctcgccatcacattcaggttcgcctggagggcgaggggtggcaaccagatacggtgagtggtcgtggcgccattttaagaaccgctgcagataacgccagtttcagtgtggtcgttgatggcaatcaggaagtgcctgcggacacctggacgctggattttaaggcctgtgcattggcgcaggaggatacgtagccgtctgttccactcatacttcctgtatcagtgaataaggcgaatactgtatatcaggttcgaggatgtattgaaaatttactcaaggcaaatatggttagcaatcttcattgcagaaaaatcaattgctgattgattttaaaatctgaaattcatcttttttgtagggagaggaatattatgtttcgtaaaataatttaacggacactgatgcctttattatttctgttttgtggatttgtttgattcactcttttgtgagcggggctttataagcccctggtataaggtttgtttatctgtcaggtattcatatgtgatatttaagattttatgtttagggggctttttcttgtcccctcaggcgtaaaaataatttattttttacataaaggaataaagcatatgtcttatgcacgacatttaccggtattaatgtatcaccatgtcagtgataaacccggacagataaccttatctccccgtacgttccgggcgcagatgaaatggctggccgaatctggctggaaaaccgttactgctgcagaggtggaagctttttatcatggtgcaagattgcctcgtaaaagcgtcatgctgacctttgatggcggctggctggataactggttgcaggtttttccggtgctgcaggagtttaatctgcatgcgcatctctttcttgtgaccagtttgatcagtgacggaccggtccgtattcctgcaggcgaaccggtgtactctcatgatgagtgtcaaatgctggttaaacaaggccgggctgatgaggtcatgctgcgctggtcagaggtccgggagatgcacctcagtggccttgttgagtttcactcgcacacgcacacccaccgacgctgggaccagaagcctgtgtcccgtaatccgtcggatttgcttcgtgtcgatattcttcttagtcgtaagcggatgagggagatgctgggttattgcagtcagcatctgtgctggcctgagggctggtattgttctgactatattcatgtggctgaagagttggggttcacatacctgtataccacagaaaggcgtatgaacaatccagtcatcggttcacagcgtattggtcgtatcaacgcaaaggagcgaaagaatgtgggctggctgaaacgtcgtctgttttatcacaccacgcccggattttcttcgctgctggcccggcataagggggcacgtcggatagctgactgagccagagaccaggatgaaagtgctgcataccgaatcctcccccatcatcggcgggcaggggttgtaggctatatcccaaatgatggtgctgattttgagcagaaataagataacaccggaggccgtgatagacccggttgcgcagaatctggaggcagcaggtcactggcgcagggcttctacccgctggcttttggttatgggagattttgaatgtacagaggcccagcgggagtggttgttgttgcgccggaattattgccttgcgcagatatcttcccctggcgccagtaaagctggatatcagcgacgtgacgaaatgagaggagcctgcacataggtttgtgttttgagtaagtgtcttatttaaaccgtctgttctgtttcctccgctttcacaaataatgtcgagccgggtgggggactcaagtaagaataatctggcgatgttttgcttgtttccacgggatactttgttaggtgaacgatacaattaatgcgctccagactgcgtcacagaaaaggagaatgcctttgcagaacgggcgcatgacaatgaaccactttattattggtatctggttcggcgacaaccttgacgatcacgtctgagatagggtatttacactgagtggtaaacaggttcaattagtaaccggagatggatgcaaaatcatgatcgattcagatgctattttgcagccaatagattttttattaagatgatatcaaggacattgaggcacacaatgacgtatcagtaagtcgttgatagctcatttgatataagaatttcttttatcaacggaagataatgatggaactgatcaataatcgtggtatgcgagactggatgatatttattaaagtggcggaagtagggaatctttcccgggctgcgcgggaattagatattagcatttctgctgtcagtaaatcgcttagtcgccttgagaattctattgaggttactttacttcggcgcgattcacatcacttagaactgactggagctggtcagacagcctatgcaagcatgaaaaggataacatcttcctttcagtccttgctggatgaattgcgaaatccggataaaattatcagagggagtataaaattttcggctccggctattgtctgtgagtttcttgccaataagtggatatgggaatttacagctagctatccggatacaaaaatctacctggattcacgagagcgtagcgatttttttagtaaatccctggagtttgatgagctggtttttaaaagtggcataatcgaaagtgaggatctcgtgtatcgaaagataagccctttaaagttggttctttgtgcgagtccgaaatatatcagaaaatatggcaggatctcacaccctggcgatttggaaaatcacattattgtgggtcttcacaaccatggtctttccggacctcttactcttttccgtcaggatgaatcatacactattagtggcgctgttaatgttcatttatcttccaataatcttttgagtgttcttaatttggttttagaaggaaagggtatcaacctcatgactccggcctggcttgccaccaaatacttaaaaaataatgaacttgaaattatacttcctgaatggagggttccagatctccccatttatcttgtatggcgtcatcgtcagtattattctcctttatttcaacgctttctgtcttttattgaagataaatggaataatcgcccacaaattgattttctgaatgatgattaacccgtttggaatggttttgatacgttcctgacttaaacccacatgatgactgaattgaggcatcgagatatgcgactggtcagccagtcgtcttttgacgatgcccaatacaaaacatgatgccgactgacggaaatgataatacccggaaacaggacggggctgtttttgggcagccggaagttaagcccataccagaaacgttgcagtgtactgaaaaatggcgccaggttgcacctgttcaaagattttctgaaggcgcaggagtattcattactgatatcctccattgcgccttcgggaacccacaggaccagctattttaccgatagtgtttaaaaggcgtaagtaatgccgagcatgaagtcattggaggcagcctttgtgtctgcatcataagcggtatgttcatcaccagcatagtgattttttgaaatgcttactttgccagcattaatgtatttataactggcgtcaatcataatattatctgttacagcatattttgcaccgatacctgcgccccaggcaaagttattttttgaagcagacagagtttcattaataccaaaaccaacaggaatggtgttattacttagcttcacatgagcgaggccaacgcctgcgctgatatagggagtaaatgccgtactattgtgaaaatcataatagccattaaccatgtaagtggtcattcggacctgattttttacatttatgtgtactggatcaccaaatgcaataatatcctgcccgcctttagcatccgtctcacctctgaaagtggtatccagttctaaacgtactggaagctggaatggatcataaaagtcataaccgatagcaaccccgccgccaaaaacgcctttggtacggtcaggtaacgttgcatgaccattaactatctcatcctggctgaaggttgagttgattccatagacattgactacggatgtccccgctttcccggtgatatagatcccttcttttgctgatgcagtagcggaccaggctaccacaaggggaatgatgcagactgcgaaaaagtttttcatttcagaacctgccttaatattgggctaaaagacaagtttcacggtatagggtgtgatataacgattacataaacgaagcccaaaaaacggtctattgtaacgctgggttttctgtaagcgggtaaaaaatgagatgaagattttaaataacaatacgataatcgtcggtatggaaatccatctcctcgccaaattgccccacgtacggtttcacttctacgttatgtaacgggtagtgtgagatggagcgatgctgtaagaaaaagatgaagatgaatttgtacccgacctggataaagcccgttatcccggaataacgggcaaaaatatttactcaagtgcctgggcgagatcttgttgtacctgttgacgctgttctggtgttaagactttgcttaaatcaaaataatatttaacccgataatagcgagcctgttgttctatgttactgaaggctgcaagctgctgttttacggcggcgtcatcccatttaccggatttaatcacctctatcagcgcaccgtctttaattcccttcatagaaatctgactgacgtcggtttccagttgttggtgaagttttttgatccgggtaatctgatcgtttgtcagcttcagatgctggacaataggatcctgggcgggcaggggaggattggggacagcggtggcgaaagcgccaaaagaaacgcccgccagagtcgctgccagtaaagttgtgcgtacaaagtttttcatgaagatatcctgataagggagtgattaaccgtttttattacccacgaatggcgagcaattatcttagagcctatcccagtagggctattttacttgccattttggacctgggcagtgctcgccaaaacgcgttagcgttttgaacgccgctagcggcggcccgaagggcgagcgtagcgagtcaaacctcacgtactacgtgtacgctccggtttttgcgcgctgtccgtgtccaaactggctgcgccaataacgcctggtgggataggctcttagtcagaatacgttgcctgccacattacgccacgcgaatttgttttacggagagttacggagtgaaacaatcccgccgcggtgagcggcaggttgcttacaaggtgaatggatcggcatcgcgccaggctggaaatttttcgcgatagtcctgcaaggcgacgagagaaagatcggcatcgatacgtgtcgcctggtgtggttcggcggtggcgataatgtcgccctggggattaatgatccggctatcgccgcgataatgtagcccgttaccatcggtgccaacccggttgcagcctgcgacataagcctgattttcaatagcgcgcgccgtcagtaatgtttgccagtgtagcgagcgcggcgcaggccagttcgctacatacagcgccagatcgtaatcattgcggttgcgcgaccatatcggaaagcgcagatcgtaacagatcagcggcagaatgcgccaaccgcgccactgcacgatgatgcgtttatcgcctgcggcataatgttgatgttcatccgccatacgaaacagatggcgcttatcatagagatgaaccttgccttccggttcaaccagtaagaagcgatttacggcgccgcgctcagtttgtagcgccgcgctgccggcaatcagagcgtcagtttgtcgggctttggcctgcatccacgtaatcacgctatcttgcgaaagtgagttattagcggcctccatcgcgaagccggtggtaaacatttcaggcagaacaatcacatcccggccagatacgagctctagctgtctgtcaaaatgacgcaggtttgccgggccgtccatccagactaaaggttgttgcaacagagtaattttcaaaccagacacgatcggagctcctcattgaacagcgtctttacactgtagcatgagcaataataaaaaagcggcaagaaaaagccccgcgaaagcggggcaggaaagacacgagactgattatgcggcttcgactttacgcactttctccggcagctttaccggtttggtcgccagcgcttcaggttcaaaatcatcaacgttgatactgcgcaggcggctctcttccgctttcgccaggatggcggcttcatctttatctataagccctttcgccagcgcattgcgcgccagttcatccagacgagtaaacggcagatttttacccagttctttgcagatgcgctggtggatagggtcggcagcgatgacatcacgcagcgcttcttccagtaaaccgaccggattatgttcggcgggcgtcagatactgaccgcgcccaatgcgtgaacgtgtggcgttcggcacctgtaggatcttcgccacggcgtgatccagcttatcagacggcgccagataatgacggccagtcgggaagatcatcgcggtgagcaatccggccacgacgcggttcgggaagttctgcagcagatcgtccatcgcttgttcagcacgatacagcgcatcctgtacgccccagtgcaccagcggcaggtcggcttcgtggcgaccttcgtcgtcgtaacgcttcagtacggctgaggccagataaagctgactcaacacatcgcccagacgcgcggagatacgctcgcggcgtttcaggctgccgcccagtaccgccattgacacgtcagacagcagcgccaggtttgcgctcagtcggttcagatgctggtaataacgcttcgtggcgtcgccggttggcgtatggctcgttaatccgcgggtcaggccaagccagaaactgcggacggtattgctgccgacatggccgatatgtttaaacaacagcttatcaaaggcattcacatcattattctgcgctgcggccatctcttccagtacataaggatggcagcgaatggcgccctgaccaaagatcatcatgctacgggtcaggatattcgcgccttccacggtgatcgcgataggcgcgccctggtaagcacgcgccaggaagttgctctcgcccagcataatgcctttacccccagtgatatccatcgcgtcgataatggactgctggccacggtgggtgcagtggtacttcacgatagccgacagtaccgccggtttttcacccagcataatgccataggtgattaacgatgcggcggcatccatcacataagcgttacctgcaatacgcgccagcggttcctcaataccttccatcttgccgatagatattttgaactgacgacgaatgtgagcataggcgccggttgccagcgcgacggatttcaccccgccagtggagttggacggcagggtaataccgcgtcctaccgacaaacattccaccagcatacgccagccttgtccggccattttggggccgccgataatataatcaataggcacgaaaatatcgttaccgcgggttggaccattctggaacggaacgttaagcgggaagtgacgacgaccaatttccacacccggcgttgaggtggggatcagggcacaggtaatacccagctcttcttctccgcctaacaatctatccggatcggaaagcttaaacgccaggcccaacacggtagctatcggtgccagcgtaatgtaacgcttgttccaggtcaggcgcatacccagcacctgctggccctgccattcgcccatgcaaaccacgccggtatccggaatggcgcctgcatcagaacctgcttccgggctggtcagcgcaaagcaggggatctcctggccgcgcgccagtcgcggcagatagtgattcttctgctcttccgtaccatagtgctgcaacaactcgccagggccgagtgagtttggaacgccgacggtgatagccagaatcccggagacgccggacagtttttgcagtacacgggactgcgcataagcggagaactccagtccgccgtactcttttttaatgatcatcgcaaaaaaacgatgctctttcagataagcccacagttccggcggcagatccgccagttcatgggtaatctggaaatcgttcgccatccggcacgcttcttctaccggaccgtcgagaaacgcttgctcttcggcagtgagttgcggttgcggatagttgtgcagttttttccagtcaggcttgccctggaacagatcgccttcccaccaggttgtaccggcatcaatcgcttctttctcagtgcgcgacatcggcggcatgaccttacggaagccgcggaacaccggtgcggaaatcattgattttcgcatcggtgtgaggttaaacggcacgaggataatggccagaggaaccaacagccagatggaccacaggccagcgacgccaagtgcggcggtccaggcgagcagaatcaggctgctgagaaataaactcacgcggtgatagaacaatgcgccgagcagaacaaccgtagcgataatactcaaaatcatcataacgaaaagctcccttgcttgtaggaggtctgaccacttgtgatgattaggttgtagtggatgtaaaattttttagcaatgtgtttacaaaataattacaacaaagctcacattgttgccgtttttgggggcacgaaaaatcaaaagcgtgaggcgttaattcggcttatgcttctcgcctgtactgctatccggtacactgcatactgtcatttacattcatgctgaaggatatcctcatgtaccaggatcttattcgtaacgaactgaacgaagcggcggaaacgctggctaattttttaaaagatgacgccaatattcacgccattcagcgcgcggcggtcctgttggctgacagttttaaagcgggtggtaaggtactttcctgcggtaacggcggctcccattgcgatgcgatgcactttgctgaagagctgacaggtcgttatcgtgaaaatcgtccgggctacccggcaattgcgatttctgatgttagccatatatcctgcgtcagtaatgattttggctatgactatattttctctcgttacgttgaggcggtagggcgcgaaggcgatgtcctgttagggatctcgacgtcgggtaactctggtaacgtgattaaagcgattgccgcggcccgtgaaaaaggcatgaaagtgattacgttgaccggcaaagacggcggcaaaatggcgggaacggcggatattgaaattcgcgtaccgcacttcggttatgccgatcgtattcaggaaattcatatcaaagtaattcatattttgattcagttgatcgaaaaagagatggttaaataactatacccgtcatacttcaagctgcaggtgcgttggttgcgctcagaaaccccagtcacagagttatctatgttcctggggatttcctcccttaccgccttcctgcaactcgaattatttagggtatagcatattgttttcttggatattttgagatttgattggctgtaaaaattacgccttcccgcttaaggcgtttgtggaggtgatatatgtgcgaactgcttgggatgagcgccaatgtgccgacggatatctgctttagcttcaccggactggtgcagcgtggcggcggaaccgggccgcataaagacggctggggaattaccttttacgaaggaaagggctgtcgcacgtttaaagatccgcaaccgagctaccattcgccgattgcgaaactggtacagaattacccgatcaagtcctgctcggttatcgcccatatccgtcaggctaatcgcggtgaagtggcgctggaaaatacacacccttttacccgggaattatggggacgcaactggacttatgctcataacggtcagctcaacggttataagtcgctggaaaccggtaattttcgtccggtgggggaaaccgacagcgaaaaagcgttttgctggctattgcataaattaacgcagcgttatccccgcacgccgggcaacatgacggcggtatttaaatatattgcgacactggcgacggtattacgtgaaaaaggcgtttttaacatgctgctgtcagatgggcgatatgtgatggcgttttgctcaacccatttgcactggatcactcgccgggcgccgtttggcgtagccacgctggtggatcaggatatggaaattgatttcagttcacagaccacgccaaatgacgtggttaccgtgattgctacccagccgctaacggggaatgaaacctggcaaaagattatgccaggcgaatgggcgttattttgcctcggagagcgtataatttgaggccagctgtggctgaacgacttcgtgactcaacggtttgctcacgacgtaacgtccatcaacgatagaaacagtcggcggcttatgcgtctgttcaaaataatcgtagccgggttttagctgcgcccagaaatctttgtaatatgaatatttatgacgctgcatattggcgtcggtcatccggaacggataaatactcacctgcacgctcggctgaccaaagaccagcgcggcggtgacaaactggaaaatctcatcaatgccgctgtcggtcatggcatagcagccgacggaaacacaggcgccgtgaatcatcagatatttaccatcatagccatgcgcgcgatcgtaggcattgggaaaaccaatgttgatggccttataaaaacggctgtctggtttgagttgattacgctgaacgctgtaaaacccttccggacttttaaaatcgccctgacggcgtttcgggcctaacccgccggaatagttgcaaattttgtagctatcaagcaactggtattgctcacccattttgacgtagagatcaagggtgcgctcttctttaaaaatctgaatatagaccggtgagcccattaactgctgcttatactctttactgaccggcgtgacggggctgctgctgctcagcaaaccggcaaatgagacgcacggcatcagaagcatcgcaagaaaaaatgcgattttacgcatactgcttgttccttgataaaacggttacacacgccagaacggcaaaagagtccccaaatcggagtaatctggatttggagcgctcacattagcaccacggcagtttttcgcaagtccccgtgtgtacgtttacaattttcccgccgctttcgtcgtcataccttcgaatatgtcgcatttttaacgcgaatgtctctttgcgcgcaataaaacatactgtacacttaaacagtattgtgggggcgagcgatgcgcaaaatcatacatgttgatatggactgtttttttgccgcggtagagatgcgtgataatccggcgttacgcgatatccccattgccattggcgggagtcgtgagcgaagaggcgttatcagtaccgccaactatcctgcgcgccagtttggcgtacgtagcgcgatgccgaccgccatggcgctaaagctgtgcccccatctcaccttactgcctggccgctttgacgcctataaagaggcttcgcggcatgtacgtgacatcttttcccgctacacttcactgattgaaccgctctcgctggatgaagcctggctggatgtgactgacagcccgcactgttatggttcggcaactctgatcgccagggagattcgtcagactattttcaatgaactgcaactcaccgcctccgccggcgttgcgccagtgaaatttctggcgaagatcgcctccgatctcaataaaccgaacggacaatatgttattacgccagccgatgtacccgactttcttaaaacgttgccgttagccaaaattccaggcgtggggaaagtttccgccgccaaactggaaaatatggggttaagaacctgcggggatattcaacagtgcgatctggcgatgcttctcaaacgctttggtaaatttggccgggtattatgggagcgtagtcagggtattgacgagcgtgatgttaacagcgaaaggctgcgtaaatcggtaggtgttgagcgtactctggcggaggatattcatgaatggtcggactgcgaggccattattgaacatttatatccggaactggagcgtcgtctggctatagtaaagcccgatttactgattgcccgacagggcgttaaattaaaatttaatgattttcagcaaaccactcaggaacatgtctggccgcaattaaataaagaagacttaattaccaccgcccgtaaaacctgggacgagcgtcgcggcgagcgcggcgtacggctggtggggctacacgtaacgctgctcgaccctcaactggaacgacagttggtgttagggttataagtcaggccattaatattttatcactattacgattgcgccatctaaatttcagtattactatacccgcgttttctcattctcaataactgcaaaggaggttcatcatgacactttattctctgaacgcactttgcagacctttccaggattaattttcttttattgccctggattagtctgccatttcctgattttttaattcatatatggaatggtatatgggcaattatattcgtcctttatcagatgtggtattttctatcgcatcagataacctgtggatcgaagattccgcgatccaacaattatatacgacggctaagttaaccggtatgaaacgcgttatcgggatgccagatctgcatccggggcgtggctatcctattggcgcagcctttttctcgcgtggacgcttttatccggcgctggtcggcaacgatatcggctgcggcatggcgttatggcaaacggatattttagggcgtaaatataacgccgataaactggagaagcggctggcgtcgctgactgacgtggcggacgcgcagtggctggaggagaatgtccccgccgcaatgcagcatcattcgtggcgctctgcgctgggttccattggcggcggcaatcattttgccgagctgcagcaggtcgatcgcatcgtcgatgctgattcgttcgctttgtcggggttgcaaaaagcgcagttattactgctggtacacagtggttcacgcggtctggggcaaactatcctgcgtcgtcatgtggaggcgttttcgcataacggtttgccggaagatagcgacgatgcgcgccgctaccttgcagaacatgacgatgcgctggcatttgcccgcagtaatcgcgcgctgattgcccgccggatactgcaacagctcagggctgagggcgaaccgcggctggatgtggcgcataacttcgttgaaccctgtactgtcgcgggtgaggcggggtggctgcaccgtaaaggcgctacgccagatgggcagggactggtgattatccccggctcgcgcggcgattatagctggctggtgaaacccgtcgtcagcgaggagagcctcttctccctggcgcatggcgcaaatggatgcgtaccgagtgtaaagaccggttatcggcaaaatttaccccgcgacagctctgccgtaccgggatgggtagccgggtgatttgccgcgatcgccagctcatttatgaagaagcgccgcaggcgtataaatccatcgatagcgttgtggattgtctggcagacgccggactgattacgccagttgcctgcctgcgtccggtgctgacgctgaaaacctcaggggagaaaagcgcatgatcttactgcaactttcttctgcgcagggaccggacgagtgttgtctggcggtaaaaaaagcgctggattgtctgacgaaagaagctgccagagaaaaggtatcgctgacgcgacttgaaacagagccgggacgattaccagacacgctgcgttccgcgctggtctcgctggacggcgaaaaagctatggctttcagtgaacgttggtgcggcacgttactgtggatttgtaccagcccgtatcgtccgcaccatgggcgaaaaaactggtacgtcggcattgggcgcttttccgccgacgagcacatacagtctgatgagattcgtttcgagactttgcgctcttccggcccgggtgggcagcacgttaataaaaccgactcggcagtgcgggccacgcacctggcgagcgggattagcgtgaaggttcagtcggagcgcagtcaacatgcgaataagcgtctggcccggctgctgattgcctggcggctggaacagcaacggcaaaatgagtgtgcggcattgaagtctgaaaggcgtctgttccatcatcagattgagcgcggcaatccgctgcggatatttaaaggaatggcgtttacgccacaataattcggtgttactggcgctgttatagggctgtctggctattcgcgtgtagccgcagcgctatttcagcgcatccaggagagcttatctggcaatggatacccgatattccatattgatagcccgtccagaaatgggacgggcattttagcgctttcttacttcgcaggaatcgctttcagcaattcggtcagcagagtccagtagtggccgacgctttcgatatgtacctgctcatccggagagtgaggtccggtaatggtaggcccaatagaaaccatgtccatatccggatagggtttcttaaacagaccgcattccaggccggcgtggataatctggatgttcggtgtcttgttgaacagacgctgataggtttcccgcaccaggtgcatcaccggcgagttcgcatcgggctgccagccaggatagctgccttttgcttcggttttcgcgccagccagcttgcccagcgaatccagcatactcaccacataatctttaccgctgtcgataagagagcgaatcaggcagtgaatttcgacattcgcatcggacattgtgaccacgccaacgttcagcgatgtttccactacgcctttcgccacgtctgaattgcggatcacgccgttcggcgttgcgttcagcaggcgcacaaaggtatcgcgtgacggcgcggtcaatgcggctttatcactggcaacctcattgagttgcagcgtcaggtttttctctttttccgccagttcgtttttcagaatatcctggtaagcgttcactaatgttttcagcgcgcctacgttgtctgcggcaacggcgagggtagcgaacgcttcgcgcggaatcgcgttacgcagcgtgccgccgttgaaatcgatcagacgcagatccagttcttctgcgtgcccggccagaaaacgcgccagcaatttgttggcattgccaagaccgaggtgaatttcaccaccggagtggccgcctttcaggcctttcagggttagcttaaagcacgcaaatcctgcgggtacagcttcacgggtcaacggcagattagaggtaaaatcaataccgcctgcgcagcccatatagatctcaccttcttcttcagagtcggtgttgatcaggatgtcggcctgcaaccagccggactggaggccgaacgcgccatccatgcccgcttcttcggtcatggtcagcagcacttccagcgggccatggacgacattatcatcagccagtaccgctaacgcagaagccattccaataccattgtcggcgccgagcgtagtaccgcgcgctttaacccattcgccatcaatataaggctggataggatctgtagtgaagtcgtgaacggtgtcgctatttttttgcggcaccatatccagatgcgcctgtaaaacgaccggcttgcgattttccatacctgcagtggcgggcttacggatcagaatattaccgacctggtcgcgatccacgtaaaggcctttctctttggcccaactcacaatatgttccgcgagttgctcttcgtgataggacgggtgaggaatagaacagattttggcaaaaatatcccacaaaggttgtggtgataactgagacagttcagacacgataagtctccttggcggtggtctgaaaaacgttcttacaggccacagggttagcggaattgataactcttacgagatgcgactgagaataccactttctccgcctgcgggtagtataaagcatacaaaaagaggcgtggattccgctaaacactggtttttagcgcgtcaggtctctataatctcgcgcaactatttccccctcgaacactttttaagccgtagataaacaggctgggacacttcacatgagcgaaaaatacgtcgtcacctgggacatgttgcagattcacgcacgcaaactggcgagccgcctcatgccttcagaacaatggaaaggcattattgccgtaagtcgtggcggccttgtaccgggcgcactactggcgcgtgaattgggcattcgtcatgtcgataccgtatgcatctccagctacgatcacgataaccagcgcgaactgaaagtgctgaaacgtgcagaaggcgacggcgaaggctttatcgtcatcgacgatctggtcgataccggcggcaccgccgtcgcgattcgcgaaatgtaccctaaagcgcatttcgtcacgattttcgctaaaccggcgggccgtccgctggttgatgattatgttattgatattcctcagaacacctggattgagcagccctgggatatgggtgtggtatttgtaccgccgatttcaggtcgttaatcagcagcttttcagagcgcccggcaatgccgggcgctgttttattggttacaataagcctctatgagtatccaaggaggctgcacgaatgacacaggctaacctcagcgaaaccctgttcaaaccccgctttaaacatactgaaacgtctacccttgtccgtcggttcaatcgtgggtcgcagccgcccatgcaatccgcgctggacggtaagaacgtcccgcactggtatcgcatgataaaccgcctgatgtggatttggcgcggcgttgacccacgagaaatccttgatgtgcaggcgcgcattgtgatgagcgacgcagagcgaacggatgatgatttatacgatacggtcatcggttaccgcggcggcaactggatttatgagtgggcaaagcaggcgatggactggcagcagaaagcctgtcaggaacaggacgccatgcgcagcggacgctactggcttcatgcctcaacgctctataacattgccgcctacccgcatttgaagggcgatgagctggcggagcaggcgcaggcgttggcgaatcgcgcctatgaagaggccgcgcagcggttgccaggctcgttacgtgaaatggaatttgccgttcctggcggttcgcctgtcaccgcgtttttacatatgccgaaaggggatggcccgtttccgacggtgctcatgtgcggcggcctggacgccatgcaaaccgactattacaccctgtatgaacgctatttcgcgccgcgcggtatcgcgatgttaacgcttgatatgccttcggttggattttcatcaaagtggaaattaacccaggattccagcttgctccatcagcatgtgttaaaagcgcttcctaatgtcccctgggtggatcatacccgtgttgcggcgtttggtttccgttttggcgccaacgttgcggtgcgtctggcctatctggaagcgccgcgtttgaaagcggtggcttgcctggggccggtggtccatgcgctacttagcgatccgcaacgacagagcacggtgccggagatgtatctggatgtgctggccagccgtctgggtatgcatgatgcttcggatgaggcgctgcgtgtggagctcaatcgctattcgttgaaagtacaggggctactgggcagacgttgtcctacgccaatgctttccggcttctggaaaaacgatcccttcagcccggaagaagagtctcgcttaattacaacatcatcttcagacggtaagctgatagagatcccttttaacccggtgtaccgcaattttgaccgcgcgctgcaagaaattaccgactggattaatcatagattgtgttaatagattgataaattctattgatttggtaaaacagttgcttcattaaaggagatcgcaatgacgttaccgagtggacacccgaaaagtagattgatcaagaaatttaccgcgcttggcccctatatccgggaagggcagtgcgaagacaatcgtttttttttcgattgcctggcagtttgcgtcaacgtgaagcccgcgccagagaagcgtgaattttggggctggtggatggagctggaagcacaagagaaacgcttcacttatcgttatcagtttggtttgtttgataaagagggcaactggaccgtagtgccgattaacgaaaccgaagtggtggagcgactggaatacacgctacgcgagtttcatgaaaaactacgcgacctgctgatttctatggagctggcgctggagccgtctgacgatttcaacgacgagccggtaaaactgtcggcataaccctgctgccatgcctgatggcgcagcgccatcaggcacaatgcgacttatcagaactggtaggtcaaccctattgccacaatatcatcgtcattaatgcctaacgtgttatcgctatcaagctgattgattttgtaatctacaaacgcggacatatttttgttgaagtaataggttgcgccaacgtcaatgtaattcaccaaatcctcactgccgacgccctcaatatctttgccttttgacagcacatagcctaatgacggacgcagaccaaaatcaaactgatactggataaccgcttcgaagttttgggttttattggcaaatccgccggaaactggcgtcatgttgcgggtttctgaatagaaggtcgcaatataaatatcattagcgtcatacttaacacccgtagcccaggcttcggctttatcgcccgtaccgcggcgctgcagattttgctccctggtgcgatcggagagagtataagcgccgctgacggcaaaatcgctgccgccgaaatcatagctcacggatgtgccgaagccgtcgccgttttgctttttcacatcgcgatcttcgtttttcccctgatactgtaaggtaagatccagtccatcaacgatgccgaagaaatcggtattgcggtaagtcgccagcccgctggcgcgtttagtcataaaattatcggtctgggcggaagagtcgccgccgaattcgggaaacatatccgtccaggcctcaacatcgtacagcgcgcccaggttacgtccatagtcaaaagaaccgatatcttttaatttcaggccagcaaaggccaggcgggttttttgctgggacgaatcactttcggctttattactggcaaactcagcttcccagcgcccgtagccggtcaattgatcgttaatttgcgtttcgcctttaaaaccaaaacgaacgtagctttgatcgccatctttgctgtcataatcgctcatatagtgcatggctttaacttttccatacacatcaagcttattaccgtttttattgtaaacctcggcggcgtgaacagatgctgatgcgatgatactcaccactattgccagagtgcttttattcatttccattcctgttttaattacgcgctatgatttgtcgggaaacccggtaaaaaacaggaaggtttttaacgttcggtaatgaaagatttatgacaaagtgagaatttttttaaaaaaatatgtttaattgttgcggtaataaaatggtcaaattccgccgctacgcttgctgatcctgcgcaacaaaatttcacgctacgcgtacaggttgttggcaaccggagccagtcctgctaaaacgttcatttggtctttatttcttattttgaacggcagagaatcatgagtgacagccagacgctggtcgtaaaactcggcaccagcgtgctaacaggcggatcgcgccgcctgaaccgtgcccatatcgtagaacttgtccgccagtgcgcgcagttacacgccgcgggacatcgtattgttattgttacctctggcgcgattgccgccggacgtgaacatctcggctacccggaactgccggcaacaattgcctctaaacagcttctggcggcggtagggcaaagccgcttgattcaactgtgggagcagttgttttcaatttacggtatccatatcgggcagatgctgttgacgcgtgcggatatggaagacagagagcgctttctgaacgcccgcgatacgctacgtgcattactggataaccatattgtgccggttatcaatgaaaatgatgccgttgcgacagcggaaattaaagtgggcgacaacgataacctctccgcgctggcggcgatcctggcaggcgcggataaactgctgctgctgaccgatcagcaaggattatttaccgccgatccgcgtagcaatccgcaggcggagcttatcaaagatgtgtatggcgttgacgatgcgctgcgctctatcgcgggagacagcgtttccgggctgggaaccggtggtatgagcactaagcttcaggcggcagacgtggcctgtcgcgcgggtattgatacgattattgcctcaggcagtaaaccgggcgtgatcggcgatgtgatggaggggatttccgtcggcacccgttttcatgcgcaagcctcgccgctggaaaaccgcaaacgttggatcttcggcgcgccgccggcaggtgaaattacggttgatgaaggcgcgaccgcggcaatgctggaacgtggcagttcacttctgccaaaaggcatcaaaagcgtgacgggcaatttctcgcggggggaggtcatcagaatttgtaacctgcaagggcgtgatattgctcatggcgtcagccgttataacagtgatgctctgcggcggatagccggtcaccactctcaacaaatcgatgcgattctgggctatgaatatggcccggtcgctgttcatcgtgatgacatgattactcgataaggaacaggcatatgctggaacaaatgggcattgctgctaaagcggcgtcgtataagctggcgctgctctccagcggcgaaaaaaatcgcgtgctggaaaaaatagccgatgaactggaagcgcaaatggaaagtatcctcagcgcgaacgtacaagatgttgagcaggcgcgagccaatggcctgagcgaagcgatgctggaccgcctggcgctgacccctgcgcgtctgaaagcgattgctgacgatgtgcgccaggtctgtaatctcgccgacccggtcgggcaggtgatcgacggcggtctgctggacagcgggctacgtctggagcgccgccgcgtgccgttgggcgtggttggcgttatctatgaggcgcgtccgaatgttaccgttgatgtggcttctttgtgtctgaaaaccggtaatgcggtgattctacgcggtgggaaggagacgtatcgcacgaatgccgcaaccgttcgtgtcattcagaaggcgctgaaagcttgcggtttaccggaggcggcggttcaggcgattgataatccggaccgttcgctggtcaatgaaatgctgcgtatggataagtacatcgatatgctgatcccgcgcggcggcgcaggcttgcataaactgtgccgcgagcaatccaccattccggtgattaccggcgggattggcgtgtgccatatttttgttgatagcagcgcagacatcgccccggcgctgaagattattgttaacgccaaaacccagcgcccgagcacctgtaacacggtggaaaccttgctggtgcatcaggacatcgcagaacgctttttgcctgcgctgagcaagcagatggcggagagcggcgtaacgttgcatggggatgaaaccgtcatgcaggtactgcatggccctgccaaactggtgccgctgaaaccggaagagctggataacgagtttctgtctctggatctgaacgttgtggtggtcgaaaatatggatggcgctatcgcccacattcgcgaacatggtactcagcactccgatgcgattttaacgtgcgatatgcataatgctgcgcgtttcgtgaacgaagtggattccgctgcggtttatgtcaacgcctctacccgttttaccgacggcgggcagtttgggcttggcgcagaagtggcggtcagcacgcagaaattacatgcccgcggtccgatggggcttgaagcgcttaccacctataagtggatcggctttggcgatggtacgattcgtgcgtaattaatgacgagcggtgcaaaaatagccggttgagtagcaaggctattgacgcaccgcccggttagttttaaccttctaccccgtgattcacccgcgtgaacacacccttctcagggccgatatagctcagttggtagagcagcgcattcgtaatgcgaaggtcgtaggttcgactcctattatcggcaccatctaaatcaatcacttatgtacaacctcatttctcaaaaacaccattttttgctctcgggtacactctcgggtacacaactagcaaaacataagcagtatcccacctaacccaaagatgatttcttgtttaccatgcgccatgagttggcctaccatttgataggctgaatacgtattggaaagattctacattccatcatgttaatgattccgtctcagagctatgtactctgatcctacccgcgtaatatgggcacaaccctaagcgaggttctggttttcaaattgttccggactgagaccgccacaggcactgtgacgacgctaccgattgtaatcacactcactataattaaacactgctgtccgcattatttcccggctgacaaagtcctctccgtggatacattccaccttcagcgtatggaagaagctttccgcacaggcattgtcgtaacaacaacctctggcgctcatacttccccgcagattatggcgtttcagtaagctctgataatccgttgaacagtactgaccgcctctgtctgtatgcacgatgacattttccggacatttacgccgccacagcgccatctgtaacgcatcgcaggcaagctgtgctgtcatccgcgaagacatcgaccagccaatgactgaccgcgaccacagatcgataaccacggccagataaagccagccttcaccagtgcgaagatacgtgatgtcacccacccacttctgattcgggccgctggcgtaaaagtcctgcttcagcagattctctgagactggcagaccatgtttgcggtaactgaccggacggaaccggcgcgaggctttcgcccgcagcccctgccgacgcaggctggccgccacggttttcacgttgaactggtaaccctgagcacgaagctcatccgtcaggcgtggcgcaccatagcgttgttttgcgtcactgaatgcttcccggaagacgttatcacagacaaggtggaaccgctgacgccggtttatctgatgacgacgctgatgccagacgtaccgcttacagatgcaggctatcgccagcgagctaagcgcccggttaaataccccagttgaagtcggtggtgtggaagccaacatggctgtggctggcgcgttaacgacgcctggatgcgacgctccgctggcgatcctcgatttaggcgcaggatccaccgatgccgccattatcaataacgatggcgtagtgaaggcggtacaccttgccggggcggggaatatggtcagcctgttgattcaaacggagcttggcttaagcgatccgtttttggcagaggaaatacccgctggccaaagtggagagcctgttcagcattcgccacgagaacggcgcggtggagttttttcgtgaaccgcttagcccgtcagtatttgccaaagtggtgtatctgaaagagggcgagctgatcccggtcgataaccagacctcgctggagaagattcgtctggtgcgccgtcaggccaaagagaaagtctttgtgaccaactgtctgcgcgcgttacgtcaggtctcgcccggcggctcgattcgcgatatcacttttgtggtgctggtaggtggctcatcgctggattttgaaattccgcagatgatcaccgatgcgctggcgcagtacggcgttgtcgccgggcagggtaatatctgtggtactgaaggcccgcgcaatgcggtagcgaccgggctggttttagccggagaagccaaaaaatagtgcagaaaacagccgcgcaagcgtttagctgcggggtaagtcaaagaaaggcgatgttctctttgatatcccggcggagttgggtacatagtatcaaggtgtctctcacgtggttaattttaaggataagagcatgccaacagcaattgagaaagccttggattttattggtggtatgaacacatcggcgtcagtaccccattcaatggatgaaagtaccgctaagggaattttaaagtatttgcatgatttaggcgtgccagtaagcccggaagttgtggtggcacgaggtgagcaggagggatggaatcctgagttcacgaaaaaagtggccggatgggcagaaaaagtcgcctccggtaaccgcatccttatcaaaaacccagagtatttttcgacctatatgcaggagcagctcaaagaactcgtgtgagctgactatcgaataaaacgctaacggacgtttccatctaaggatggcggcgtccagaagggttgccagtgacagttttggactgccgattcatttcttttcgtcaaattaatgtctatatatttattgaataaatatatagttcataacttactacgttgccattaccgcgtcattcttagatgatctacatttcataaaacacttgattccatttcgtctctattaagaaaaataaaatgtgaacgctgtcaattctgtaaacgtaaaagataaatattgtatacacggatgtttgttggcaaacaggcagatggcaatcaggatcttttacggaacattgtgtatgaaaaataatattgaagagacaataggtaagtacttgcctattttaatgatattacctctggcgggtttggcagagttagcttctttatattcaatccaggctttattaccaaagttaagtgaggtttataatatcccattgaatcaggtagggatgattttatctgctgaggtggggtttctggcattagccatgttatttagcggcacgttatctgaccgttttgggcgaaagccaatcattttttattcgttgctggcaggaggtattttaactctattgtgcgcaactgcatcatcatggccgatgctggtggtataccgcgctttgctcggcattgcagtaagtggtattacggcggccgttacagtctatatcagtgaagaagtctctcctgctttggcagggattgttactggatattttatttttggcaattcgctagggagtatgtctggtcgtgtgtttgcaactttgatgatggagcatgtatctatagatacgattttctttatcttcggtggtgttctgattgctatggcactcgcggtgaagttgtttctcccgacatcccgacagtttgttcctacaccttcactacagcttggtgcagtgttgaaaggcgggttggaacattttaagaatatccgcgtatcattatgttttgtcattggatttattcttttcggctcttttacatccatctttaattttctggcgttttacctgcatcgaccgccttatgagctgagctacacctggataggtttgattccagttagcttctcattaactttttttcttgcgccatatgctgcccgtgtcgcgttgaatattgggtcgatgaatgcgctcagtatgctgatcatctgtatgatggtcggtgcatttcttacgctaatcgccccttctctgtgggttttcatttcaggtatcgttttactgtcagtcgcatttttctctgctcattccaccgtattagcctgggtcagttcacggagtccaaacgcaaaaggacaggcgacatcgttttatctgctttgctactactctggcggtgcagtaatggggtatttaaacgggtatcttttctcctggcagggatggaatgctattgcggcatcatgtctgatgatgctggggataggattatttatctgccggtttattttcgcaaaatatgagaaacaaccgcaaatcaaaaaacagtcagttcaggagagtttctgattatagacacgaagtgtgtttttatactttccataatggaatcatcattttttcattaatgtgtcactatagctaaaagcttaaattgtgaatatttggctacccggatattcgttgctccaggaatatatatgtctgctaaaacgctgtatgaaaaattagttgagtcacataccattcgtgaacttgataacgaaggacatgttttactttatattgatcgttcaatactgaatgaatataccagcccgcaggcatttagcgggttaagagaacgcggccgcaccgttcggcaccccgacacgtttttattgaatattgaccatgttaatcctacgcggtcgcaacgggatgacttaatgaccgatccgggaggacagctacaggttgattactttcgggaaaatgccgctgactttggcatcacattatttgatgtgctggatccgcgtcaggggattgaacacgtggttgctcatgaacaagggctagtgatgcctggcatggtgatcgccgccggggatagtcacacgacaacctacggtgcatttggcgcgctgggctttggtatcgggacgtcggaaattgaacatctgctggccacgcagacgctggtttaccgcaagctcaaaaccatgcgcgtaagtgttcagggagagctacctttcgcctgttccgcaaaagatattgttcttgaattgcttgaacgtattggcgctgatggcgcgacgggatatgccattgaatttgtgggtgaggccatcagcgcgttgagcgttgaaggacgaatgacgctctgcaacatggcggtagaagcgggggcgcgtggtgccattattgcgccggataaaaaggtttttgactatatctacggtaaaccgcaaatgcctgtaggtgaactctggcagcaggcattgctggaatggtcacagttgagcagcgatgctgatgcggtatttgataagacggtggcgatcaactgccatgatcttgagcctaaagtcacctggggaatcagtccggatcaaacaggttccatcaccggacgtgttcctttcccggaacaggaaaccaatccgcttaagcgcctggcgcttgagaaggcccttcattacatgggattaacggctggcatgttgctgaaagatattcgtatctctcacgcttttattggttcatgcacaaatggtcgcattgaggatttgcgtgccgttgcgaaggtgcttgaagggcgcaaaatcgccagccatgttcgcgggatcattgtgcctggttcaacaatggtaagacgccaggcggaagaagaaggactggcgaaaatctttattgctgccggttttgaatggcggcagtcgggttgctcaatgtgccttgcgatgaatgaagatgtattgtcgcccggcgatcgctgtgcatcaggtacgaaccgtaacttccctggacgacagggcgctggagcaagaacgcatttgatgagcccggcgatggttgcggcggcggcggtagcggggcatctggtcgatgttcggtcattacttcaggcaggggaataagatggatacgtttaagcaaatcagcgggcgaattgcgccgatgctggaaccgaatatcgacactgatgtgattatgccaaaacagttcctgaaagggatcgatcgccaggggctggataaaggggtgtttttcgatcgtcgctttatggctggcggccaaccaaatcctgattttattctgaacatgccgggctggcagagcgcgacattcctgctggttggccccaattttggctgtggatcgagtcgtgaacacgccgtatggggattaaaacaactgggagtacgggggctgataggtagcacatttgcaggcattttcgatgataactgccaacgcaacgggatcctcacggtctcattagatgaacctgctttggcgcgcctggcgcagcttgccgcgagtgctgataccaattctatcactgtttcactcgatcgctgcgaaattacgacggcagaggaaacgatctcctttgtgatcagtgaactcaaacgggcgatgctggccgcaggcgaagatgcgatagcctggacattgcaatacttgccggagattgaaaattttgaggttgcgcattattcacggcggccgtggctaaaacgccctgcatccccgcgcggttaaggaagaagactgcaatgaaactggttcaatatcttgtgaacggtggcaaacgctacggcattatgcaggaaaccggaataattgatctctcgcagcggcttggcgacaaatatcccactttgaaatctctcctgtgcgctaatgcgctgacggatgcggcgttatggtgtgatgagccggcggattattactaccaggaagtcacttttctgccggtgattgacgatccgcagaagatcatctgtgtcggaatgaattatgccgataagcgtattgagtttaatgaaaccaacccggccccaaccctttttgtccgctttgcggattctcagaccgggcataatggcctgctgctgaagcctgaaaataccaatgagttcgactacgaaggtgaattagccgtagtgattgggcggcgatgctcccgggtcagcgctgaggatgctttagattatgtcgccggatacagctgctatatggatggttcagtgagggactggcagcatagctggtttacggctggaaaaaactggccttcgacaggatcattcggtccgtgtctggtgaccacagacgacattcccgatccccagatgctacgtttactgacacgactaaacgggcgggaggtgcagaacgaatctacggcaaatatgatccatcctatcgcttcactcattgcttatataagcacatttactctgctttcccctggcgacacgatcctcacagggtcgcctggtggagtgggcaaaaaacgcgttccaccgctgtttttacacgatggtgatgttattgaagttgagattgaacatattggaaccctgcgcaatgtcgtccgggatagccgttatttaacatcctctgttagctggcatgacgggagaaagtgatgagtacactgattgaatgcggcgcctctccgtttattccggggtttgcgctcaaggatgttcgtctggaaaatggtctgacggtaagagtggctatcggaggcagcggttcacctttggtactgctacatgggcatccgcagaatcatacaacatggcggaaagtcgcaccgacattggcgcaaaatcatacagtcattttgccggatttgcgtggctatggcgacagcgataaaccaacgagcgatccggcgcaccgtacctattcaaagcgcaccatggcgcaggatatcgtcatgttaatggatgcgctcggcttttcccgttttgcctttgtagggcatgatcgtggcggacgcgtaggacacaggctcgcgctggattatccggatcgtgtgacctgttgtacttttatcgacattgctccaaccgcgacgatgtacgccttgaccgataaatcctttgctacgcgttacttttggtggtttttcctgattcaacctttcccgttacccgaaacgatgattgcgcacgatccggcattttttctgcgtaagcatatttctggccagctaaaaatagagggcgcgacctcgcaggaagcattcaatgaatacctgcgctgttaccagaaccctgagatgatccacgcgatctgtgaggactaccgggctgctgcgacgattgatttggacgatgatgccgcagatacgtcggcgcgtatccggtgtccgttacagttgctgtggggagggctgggaacggtagggcaactatataatgtggttggtacctggaaagaaaaggcgctaaacgttcagggggaagcattgccttgcggacactccccgcaggaagagtgtcctgagtactttatccagaaacttcagtcctttttacattcagtgttataactcggtcatcctttgcaacttcgcactgatgctatgaaaacgacacctgtaggaaaaaaacatcgccagccccttgagggctggccttctgttgaagatcttttcgtttttgtcaccgttgctcgcaacggtggatttgcccgggcagcgctggagctggggttatctccctcctatatcagcaaacgtatcgctatccttgaaaaatgtctcaacgcccggcttttttttcgaaataacagagtgatgcgtctcacaccggaaggcgaaaatgcgctgggtggggctatgcaggtcgtcagtgaaatggatggctttgtcagtcgtttggataatcaacgtggtgtgttggctggtaatatcaccatcaactgctcatttggttttgggcataaatatgtcgcagaggcgctgtcgtcatttatgatcgcctatcctgatattacggtaaaactcacgctaacggatcgtgaagtggatctggtggaagaggggatcgatattgaaattcgcgttggggatgatatcaacgaattgtatatcgcacggcagttagccactaatcgacggatcctgtgtgcttcccctgaatacctcgaacgccacggcaagccagagtctgttagtgcgcttgtgcagcacgattgcctaatgattcaggaaaaaaactcggcatttggcaattggatattaacggacggtaagcagcagacacattgccgactaaacggttttcattcttccaacagcggcagtgtggtgcttatttgggccctgaaaggccatggcattacattgcggtcggaatgggatgttgcgcagtatattgaacgaggtgagctggttcgcgtgttgcctcagtggtatcaggaagcgaatatctgggctgtatatacccggcgttcatcaagttctgatcgtatcaaaatctgcatcgatttcctcacggagcatcttgcacaatgcttgccaggcggtaaagcaccgggcgtactgtgatcagtcggcgccaactgtcgtggcgccagatgctctgacttacgtttactgttaggtgttctttttgccagcacccagtagcttttagggcgttgcgttggtggcgcggttttgtttccgctatcgtggcgaagttatcttttatcccaccacgaggcccaacctccacatagatacctccattattaccggatttctcacctggttttaacgtcatattttatctcctgatttttgggtgacgattatcggaggttgagaattctattggtatcggctggatggcattgtaagtatcacacactcactccataacaatcagattgattgagcgactactttagctcaatagatatgtgttcatcttaagcgtattatcgcaggttggtaattaaaattctttaaaaaacaataccatccatcaattcaatatgctgatttttcgaggttttctcaaatttagttatgcttatgtaatgctacctaactgactaaaagtaatgctcttttcacacaaaagccttaacagaggaaacgcaatattacgtgacttaatgcctctgctcattctcattagttataccaatgtaatgttttctcacagcaaaagagaagtagctacctgtgcagcattataggcggaaaatccattgggggtattaccaaagatgaaatagaaaattaatattattaattaaatgaatatgaaacaggtattgttcctgttatcgttacaaccttttctgtcataacaatcttctcattttctttctcgcatacttgctgagcatggtataaatgtctatgaggacgtcagctcggaaagcattcgttctgcatggtatgcctttcgctattctcaggggcgtgaaatgaaagttttctttgatggagtctatataactatatgaaattgataataatcctccttctcgcgctattcccgttatgttcatctgccagcaatcattatgcccttgtttttgaaaataacacgatactgcttgttttaaatcttaaatgttctccctgtgatttaaactgcgcaaatattcaataccagattttcaataaagagacggagtctgttatttcaggggttgctaagcctgtgacaacgggcatcgaaaataattttcgtggttatatgatgcgtaataataatacgttctacacattaattgaatcagataatgaaaacgtatgggatatgtctgttgaggagaagggaactcaacagaacaaagatgccgtgcaaaaagtaaaatatcagcttaatgctatttttgacaatggtacatgctgagtctggcttgcctcagggatacgatcgtatccctgaatatttcccatcaaaactcaggagtaaaatcattctcactaatatatttttccagtatggcggtatattgtcgccagttcccggagtcactgattactgcataatttatcgatgctcccggcgttggcgagcgtgttagcggcacatcacgtgctgttttcggcgcaaccatgatatcgccgatactttttttgtcatccgtcgttagtgttaaactcatataccacgaggtggggttaactatccgtatagtattctctttagcaataaagcgtaattttttctcctccgcttccgtgggcgcttttagcccagtcgggcgaattaaaatttttagcctcaaacgaagcggtaacaccagttttcgcgggtggtttttaatgtcctgggtgactggcggtatctgataaatgtttagccagaagagactctcccggtccgttgccagctgctggcgggaactcaggagcaggcgaagcgttctcagttctcctggctgcattttaaataccggcggcagcgccaccagcggcgttttgctgttatccggagaggcgtcaatgtttccggcgtcggtccatacctgtaacagcatcggcgttgtattatcgttggataatgtcaacgattgagcgacctcatctgaagcaaaaataattcgggttctgtcaatattaacggcagcttgtgccgggccataccatcccgtcaacccaagtagcgttaatatgactttactgaaaactaaccactgcctgtaattgcgcattcacgcttcctgccgttactgtttgtccgccgatcgcctcaagcgaggcagtaaaatcaccgctgtaggtttctactgaaccggatgatacccgtgtggttaaatctttatagccataccagcctcgggcgttgccagtgcctgtcttgatccgatcgggtaacaggttaattggcgtaccggcatcgttatagatgcggatacccactccggaagctacgccaggttcgccataatgggtgtccagtagccacgacagaccgcctgcggatgtggttagccccaagcgacgcgccgccgccacggcggtgggttgattaacgacaaaccccattgcgacattagcggcgctggtggacgggagggcactggacacggcaccggactcacattccaggctgacgtggaaaggcgcctggctattgcctccggcggctaatatgccgacggcgacagggggaattttcacgatcgcaggataatctgtgattttacataacgcgccgcgaacataggtgacgctattatatgtactccatgccccgggccaatagctgggccagccataataatcgctggcatgatccagtcccgctttgatccgctcggtaatcaagcctgggcctttaaacgcgatataaccccgaggctgcgtccaggtatctcggtccattggattctggtaggcaaaatattttcttgagtcaattttaaacatctcatatagcacgttgctaaacgcgctggcaggaatataaatatatttgtcatcctgaaaccaactgtctgcggtaagttggcgttctttccagaaacggctgtaatattcgccggtactgaggtttgtcatacggacagcaacattacgctccacatcataataggcgccttctacttcgggagtaaaaaatgcccccgcaaaagcgctatcgccatttgtcgaatacatctcatagagcttcccggcatcggcagtatcgcagcggtaaagtacctgtttactggaatagggcgtgccggtggcggccgtcaggaagttaccgatcccactggccaatagcgtgccggagggttgaaatgtttcactattactgacgctaatcaccgttggcaaaccgatattaccggtatttgtgtcagttgcgccgatccagttttgcgccgtgtagcccgcttttatcgccgcgtcagagagcgcgctcttatcggtgactttgatacatgacgaccatgttccggcgctgacaaacaggctggtgataaacaatagcgttcggaaactaaaaagcattgtgctattccttctcgcagattttgttcagatagagaaacggttctttggtgtgaagatcgagttggtaggcaacccggcaacgctggtttgcccctgttccccagcgcaccagtagagaacccgacggatgggcgatacgggcataaatctgcccactctggccgaccatgccgatgtttgtgccttcaccgttgaaaacatcagcgcccattggcggtatgccgccatccggcatcttcacggagatcagcactgctttgccgctgatagtggcgaaattgacacgcgcgatggcgccagcatacggcacaatctgctgacttcctcccgtcagttcggcatcgctgcgcatcttacgggtatcgagcgtaacgttattgacgcggtaaggagataacgaaggcagaatggcgtaaccaaagcgatcaaccacagcgccctggccattttgtacgatcgcgccctgcgcgccatcggcatgaataagcgcaaaggtatcgctggtataggggccagccgtcagaccgccagggtgaagaaccagggtgccggacgcgcccagcccttcctgacgatagttatcaccctggtcatagttggcgcgaagtgcgccaaaccgggtgttttgttgtagattaccgccaaacgtcgttggcgcgctgctatcactattgctattgcgataacgctcgtagccgccataaaccgaccatgacaggtcgctgttttcaccgctactgccggtcatggatacggttgaggaacgactttgactggactggttataattcatggcgacagacgttctgttttcgccccaatccagcggtatagagacattaaacgacattgtggtttcggtatatttttgtcggctactcacgtccagtggttcgttaacgccgtgataaaagcgatcgtaatcccaggtggtgcgctgtcgtgcgatattcaccccgtagcttatattccgccactggttgctatatcccatttgtagctgtgttatacgcgattggttattgtagtagtctgcggtgctggcgctgaggttaagcgtgccaagccgtcctaacggctggcttaccgtcgcggacaggcgattgcgctgatgcagcgtgtcggagtagtaatcaatccccgtttttgcttcccggcgtacgccgagcacgtcctgaagatcgcgaaagccgttggttgaataacgataagccgccagtaccaggttagtgccggtggtaaacgttttgctgtaactgagttccgcgcgccagccttgttggcgatcgttatgctctgcgcgcgcattcgaccaggtggcgttaaggccgaacgcgcccataccggtggcccagacgccgcccgccagccatgcctggtaacgctgcgcaattcgtgaaccgaggttgagggtaatggtgttattaacgccgtgctggaacgttccctcaaagaaacgattttcaatatcgtagtactgacgaaccctgccgaaggccagcgaatagtgccagttaccggggcgaaccgaatccggcacggaagaataaggcacggtgaaacgtgaggttttaccgctggcctcgataacctctacctccagatcgccttgataacgggtgttgtacagatcgtcaatataaaatgggcccggcggaacgttggtttcataaatcactttccccagttgttttactaccacgtgcgcgctactggccgctacgccccgaacttccggcgcataaccgcgtttgccctgcgggcgcatccgctcgtcggtgacaagtttagccccgttaaaagacagactgccgaataagctggagtccgtatagctatcgcccagcgacagaatactgttaacagacgcgacaggtctttgcacccaggttcgaacgctattatagcgccaggcgcttccgctctggttgctattggcatagcgcagattactttgatgacggacctgccaaagtccgaggttaacgcccatgtttaaaccgctccataagtattggtagcgataatggctgtcggtattttcggtgtgggtccagtttgtgttatggcgtaaaaacagcgccagcgcgccgctatcccactctgaaggagagatataaccgcgcggtttgtgcgtaagttcggtcattggaatcgtcagcaacaggcgaagcgtggcgctatcaaattgccaaccggcatgaggcacccactccctgagcgggcgacactcggtcgcagcgtcggtcgcggggagtgattttatctgtgccgctttcatcaccgataagggcaggcagggttcagtctgttgaccctcttttacagcattaaatcgaatattagtgctcgaggttaccagcgtgccattaacgtaaacgtcggcaagatagtctccggaaggcgtttgccgttcattaaaacgggcaatattttgtccgtaagtggccccctgaagtagcgcaggatcaaaataatactcttcaccttgcgcggagcctgagcaaactatggcgatcaatagcgcaaggcttttgcggttcaaattaatggtgggggacatcgtagctctcgcttatccttgcgcccaggtcgttaaccaaagtaacggtgactgtaccggagaaggatttgagtgaccgtttgcccggcagccaccaggtttgactggagaaaggggcaatcatgtcagcatccaggttatacgaagcgccgttcacttttacattcaggttacttaaagaggcaaaccagggctgcggattaacaataacaataccgctttttccggaacccttatttaccgttttaatctgtagttttttcgccagattatcaggtttacctagcccgtcaggacgatagaaaagttttattcttgagcgcagcatcaccaacattttattttgcccgctgtcgctgccaatattcgttggtggtacctgtaatacgttaaaccagaatactgactcacgatcctgcggcaattttttcgtgttgttataaattacgcgtacaacctggcctgctttgggttgaatacgaaataccggcggcgtggcaatcaatggcatcgcgctgctattttccgggctggtattcatatcgccatcgtcaaaccaggtttgtacgatataaggtattgcatcattattttttaactgcacatctacggaggaggctgttgatgggtaaattattcggctacccaaaatagtaacgctcgcccacgatgctgtggcgggtagggccaggaatagaaaaactattaagtaatataatgcggaatgtcgggtatccattttcatctcaacaactccctagcgattgaaaatggtctggcgtttcaacgccagaccgtagcgacaattatttatacgaaacggcgtattgaagggtggcagcgactgtcccagcctctgctttcccggtagagtaataccgcgcggtataagtcgcgctcgcttcagaagcatttggttccagctgtaggtcgccgtcgccagtaaagccgccggtcagattgattggctcccctgaagtgtcgagtaattggacttcaacatttttcgcgctgccagtattacccaggttaccgttactggtgacctgattaccgacaaagacagtggaaatttttgttgttttgtcctgagagccggtacacccggacagcccaatatcaaacgttattggccccgcggttttcccttgttctgataaatctttagtacttactgttggtaataacacgacgggtttagcctgattaccattaataacgacagagcatgtttcatcagagacttccccttgaaaggtgatggtgttatcagaaacagccatcgcgctgctggagacaagaagtgagcctgtgatcattgctaaatattttttcatagacatatgataatgttcctgtattaatctttactttttcaggacgagtgcaattcgcccgaatgtttcgtgcttatggaggagtggtaaaaataacgatcattaactctatttttggatgtgagctataccctcctgactattgataatgcgatataaaacaaacagacttatttctcttatcatgaaatagagcgataagcgctttcgtccatacatctcattagtacaactgatagtgttatcatttgattgagtgtaatccgataacaattctctccgcatctgaatagatagactatgttgcaatacaaacctgcacatttttgctatgtaaaatccgtatcagttaaacctcccgatggataatacgatggtgagattaaggtaaattttctgaaatgtgcttctgaaacagtataattagtcttacttttttcttacttttggcctttcagaagtttcctgagtttgcgttaaggtaaagaaaagtgttcagatttacctataactgtttgatttgtaatgtgtaggtaatacttgtgtcaattattgtttactataagtgagacttataagttaaactcaggttaattagggggctgaattcttttttgagcatgataatatgtcgtctgaatgatggatgcagttacctttaggattgtcatgaatgaaactatatttttacttgataagcgtgttgtatttgatagtacgaagatgaccttatcgcatggtaatgagataatcagaatatcagaagctgagacccatctgcttcttgctttttggcatggtctttacaaaaaagaagatattattcattttgtttgggaaaatcgtggaggctgcgtctcagaatcaagttactataaactcattaatcaaatgagaaatgattttagtagcattggtctacagtcatctgacatcgtaactcgccctcgggtgggggtatcgctgtctgttgccattgaacctataaaaaaaatcacctccctaaaggtgagtgatgaaaacgttaaaggcaccacgactcgggagaacatattttacaaaaataaacgtcacagcgtatttgtggtattaacaggagccattcttctggcattgctctatggtgtatttactatatataaagcgcctgttcgtaacagccctgatagtttttttacatatcttggcgaatataacgattatgcaatctataaaacaaaagaggataaggtcacattaagtgaagtagtttttgcttttaactctctaaaaattaaaatttaccggcaaaatggacgccatctttattatatcagggagcctaatatgaatatttttctgcaatgcttaaatcctgttgaaatggcggtgccaaaatgtattacagtaaaagaacgttactgattatatttgtaatatttatcgccattgtcgcaatcggatcgataatagcgcttgagtgggtaaatcgtgactcttatagaaccaataatcttatatgcacgacaaaatcagaagcgtatattgcgccacgaaaattgtacatggatggtggacttgtgctggatcttaaatccggcaggattaccctacactacgatgttactaccgatacgaaagagaaacggctttttttcgtgatatctgcatcagcaaactgcgcagaacgggtatgaaaacatttacttttaaagtcaattcagttaagacttttgagtctgatactgctggcgatttgttttcctggttgagactgttacagcctggtacgattaatgagttaaagatggtcaaaattgggaaaaatacctacatgttttcgcttaatcgacatttgtataatgtgtgtaccaccagtagtaacgttgagttgtagccaataatccctgtattgatgggaattcgttccgtgatttatgcctcatcaggcagcgaacctggtatcaggctaacatattgaatttagatatctgctatcgcttattctaacgatagtatcctgcacctgttgggtattgatattttcttgtctattttcggcacagggagtgccatcttgctatcattaagaacgtataacctatctctcaatattgcttttctatattaatgttactttagttatcctatcaaagcgtacagtggcaaaaggaaggccggtaagagggcaatgatttgaaagtaagaaagctatttctgatgttgtttattgccgttccactgatcgtaatgatattggtggggttactcgcgggtatcttccagctaaaacgagatatcgccgtcagcgccaatacgctgctgcggtttagcgcggatatatccgccgcctcctggcaagtcgccggaaaagccgccagactggctgagagttcctgcactgacacgctgaaagaactgtccagaacgcgggccttcactccttatgtccgtgacattggatttctggaaaatggtgatatcacttgctcctttgtcacaggaaccgaacgctatcatttttcccggctggcagggctttctttacctgcttcttatccggaacggtggttgcgatctatcggtagtatggccgaaggacccgatcgccttgttgtggtgtatgtgaaaaaagtagcagcggataaagcggctttcgtcattgtggattcgcagtatgtccaggagctcatggagatattggctgcagaaagagcatcagcctttagcctgacattcggcgcaggagaggcgattaccagcgctgcgaagttgcgcggtaaggcgtttttaacgcagcggttcacctcaaccgatcacactatccagctgatggtgcgaacccctttctcaacgttatcggcatactggttacaaaacctttttatttttattccgctgtcattgtgtctttctgtagggatgatgttgttctacaggcgctggtatttaaaacgcttatctctggcccgggagattgccaggggaataacgcacaatgaatttacggtacattatcaacctgtttttaatgttaaacacggtagttgcggcggcgtggaggcgctaatgcgctggccgcaaccggatggccgttttataactcccgatatttttattaccgccgcagaaaatgaaggcatgattattccactctctcgtcatctgttcgaactgattgctcatgacgtgataaactggactgtaccggatgatttctatatcagcgtaaatatatcgcctgcgcatcttatggatgacggttttatacaagatatagaggcgctcaggactcgtttgggaacgataacgcttatgttggagctcaccgaacgtagcctgattgtagaaccttcacaggtcgcagaaaaactttcaacgctccgtgaaaaaggcgtgttaatagcgattgatgattttgggaccggctattgctccctctcctatctccagcaattacctgtagactctcttaaaatagacagaacgtttatcgataccattgataccagcagcgatgatgttcctgtcctggatactatcattacgctgagtcagcgactgggactcaatgtggttgccgaaggggtcagtacccagcaccaattgcgttacatcttaagccacggggtaggattcgttcagggatttctttatgccaggccgatggggactaatgactttatgagttggcttggcaagtcagcccagcggcaaaatggtttgctcaagggggaaagcggatccgcgagcgatctggtggctgaataatgcaggaactcgctacggaaaaaaattcaatagcacgatatatcctggtaatatgtttatgccgtgaagaaacgtgatagcactggggcggatatttttatgagtcagaacaattatctgattgacaaaagggttattcttgattgtgaacgaatgacgctttcctgcgccggagagtcgataacgatatctgaatcggaacgcagtttgcttatcgctttttatgaaggcctttttaaaaaagatgatttaattaactatgtctgggggcgcaaaggtgtcgtggtctctgatgccagttattataaattgattaaccagctacgagggtcatttgataaaattggtcttaagggggcgtctgttgtgactcgccctcgcgtgggtgttttactctcagtttccattgaaccgttgagtgatgaggcgcaaaatacgccgttgcctgctgttgctgaaacagaagtatcgacggttgaagtgcggcacgatgacactattattaccccaacaccgggcgctgtgaataaaaaagattggctctacttttgcctggccgcgcttctgatgttttttatgatgtataaagttaagggtgaaaatattgattactttaccctccagggttcgtatgatggatacactttttatagtgtcgggcatgataaaacccatctgacggatatcgttgaagcgtactctgagatgagtaatgaaatacataaacaaaacggaaaaatcatttattacattcgtgtgcctaacacaaatatttttgtccagtgtcttaaccaacttgatatagcggagccgaaatgcatttccataaaagaacgttattaagcgtggcgacgcttggtatgctggctgtttcagtcgtactgatggtagtttgggtacgaaacagtaaccatagttctattaatactaatgaatttttatgtacgacaagaacggtaacgacgatacagcctaaagatatccatgccgatggcagtcttgttcttgattttaagatgaagagaattacgtttcaatatgaaataaaaacaaaagataacggtgtaaaaatattataccgggacgtgtatatgaaaaatttacatcgaacagcgcctggtgtttatacgttcgaagtatcccaggtaaaagtctttgccacggatacggctggcgagctgttatcacatttacgggttttgcatccggaagcggctaatgagattcgaatatctaaagtgggtgagaaaacctttttctattctcttaatcggcagctttataacgtttgtaccgcgcagtagatctgaatgttgtctgaatgcgtcagaaagcgagttgcgaaattgccctccgcaagggtaaaggttaactcgaacaccagttaaagagcataaaaacaatgagttatgaattttttactcttcatggaggtaactgatactcgctgataacctctcgcagtccgcctgacggatgcgatgccaggatcgggtctgaagcaaccatgaatccgccattaataaaaaagtaagaactctgtaagactgatttcatatccattatcgaatatatcaggttatattacctccgcagttggcatgactggtaataagcgcattaggtgctcttaatctaaatgctatttgtgtgccataagttccggtaccgccttaattatatattaaaaatggagtggttttaatgaaaagacggtcttcgttccttgtttttttaggtttattattagcgtcacctttagctttggctaacgatcagcacaccgtatcgtttggttatgcacaaactcatctcagttcattgaaaaatagcgatagcaaagatctgcgaggctttaattttaaatatcgttacgagttcaatgagacctgggggatgttaggctcattcaccgcgacgcgcaatgaaatggagaactacacctggaaagaggggaaattgcataaaaatggttccgattctgtggactatggttctttgatgtttggaccaacatatcgttttaatgactatgtgagcctgtacggcaatgcgggtatagcgacgatgaaatttaataaacactcaaaagaagactcctttgcctacggcgctggcgtaatatttaatccagttaagagtatatctatcgatgcatcatgggaagccagtcgtttcttcgctgtggataccaatacatttggtgtcagcgtaggttatcgcttctgatattaaaagtataagcgttacgtttatggcaaggaattaaaaataatatggcgctgctacagaatagggatggttatgagcgctcagttaatcttaagaggaagataaaacactcaccgtagcgttattctattgatgaaattatgataaattcactatcggaacaacttccgttaaaaacgataggtatagttttaacggatgattattatacttatttaggcatcgcttcactctttgaggatgggaagtgctttatgttcccactcaatggagaatataattcgtgtcagatatcagctagcgaagatatcataattattattgatggacgagttttgattcagggggtctggaaaggttttaaggcgctcatgcagcattatccacatgctcgtcgaatctggctcacgcgcagagatattggaaaactttatccacatggctgcgatagagatcctgatatcgatcccgatttggcaaagcctgtttttattgagcatttcattaaatacgcttgtgcaaacgatgtagcggtcggtgaaattgcgccgttgacaaaaaaggaggaggagttgttatggcactttttatataaaaagtcgatgagtcagatcgccagtagctatggcatgagtcgtaagactttgtacattcatagattgcgtatctgtcgtaaatatggcttcaaacgcttttttcatttgctatttatttaccaaagaagtcgccatatcttcgcatctaaaatttgccgtgtagacaaaaacgccgatcaggcttgaagcaaacaagatgaaaaagttaacgatgagagagtgtgaaagcatcaatcctactatgctgcttgccattaagatacttatctcggcgcttgacgaaaaaacaaaaataagactcagagagcatattgaaaaaactgaacaagaaatagcctcaagcatacatgatagcatcatgacagagacttttcttcagcaaatgaaagacattcgttacatcttaaatatagttccttgacggcgttcagaagcaagaacgcgttattatttaatgattaatagaccaggtattagtatgaaaaagatcttagtatgtttcgtcggcttggctttaaccgcatgtagcgctaattcgttgaattatggcgctgaacaggtacgggtgatgaccagcgagccaggtaaggaatgcagctacttaggggatatcacgggcagccaggggaatttctttaccggtggctggacttccaacagtaacctggaaacgggtgcccgtaacgatctgaaaaacaaagcttataaaatgggcggcaatacggtagtcctgttaacccagcgtgcaggccagacaggaagttcatggcacggttcgggctcaagcaaacaaacgaatgtcacgttaagcgggaacgtttatcgttgccctcgttaaccttattttgcaggtaatatatgcctgtttagcgcgcgcgccgcactggcgacgcgggcgctatttgggctaaccttgctttttctcactgtattcccgccaaccgccgcctaatgctttatacaggttaatgatatttaactgttgcatgagacgtgtgcgtaccaggcgctgttgtgcgccataaagcatacgatgggtatcaagcagcgtaaggtagtcatcgacgccttcctgaaaacggagtccggccagctcataggcgatttgactggcttcaaccgcgcgttgttctgattgcacctggtcattcagcgtacgctgtcccgccagaccatccgccacgtcgcgaaaggcttgctgaataacgttttcatacctggcgatttcaatctgtttttggacatgcgccctatccaggtcagcgcgtaatgcgccgccgtgaaagagaggcaaggtgatttgcggtagaaaacgccagcttcccgatcccggttcaaagagtccgctaagagacgcgctggccgttcccgccgagcctgtcaggctgatggtcgggaagaaggcggcgcgcgctgcgcctatccgggcgtttgcgccgcgcagcctgtactcggcggcgcgaatatccgggcggcgtaccagcagatctgacggtaatccgcctggcagtgtggtcgggatcgcgccttctgtaagcgtgaccgcttcgtttagtcgacgcgacagttcaggcgtgagcggctggcccaacagcaattccagcgcgttacgatcccgcgccaactgtcgcgtatacgccgcgcgattgatttcggcagaacgcagcgcgatctccgccatacgcagatcgagctgtgtggcgttacctgtccgggcaagctgggtcgtcaatgtgtatgaacttttttgcgcggccagcgtatcctcggttaagcgcagcagctcccggtcagcccgtagcgtcagccaggcgctggcgacttcggaaaccaggctcattcgcgccgcaatgtacgtctcatcaagcgccatataggcggctaatgcctggtcgctaaggcttcgcactcgcccccagagatccagttcccaggccgtcgtcgccccagccgcctcgtagcgtcggttaatctcagactcgtccatgacgctgagatcggcgggagtgcgactggcgtccatggcggtggcgatgccgagcgtcggcagcatctccgcgcgctgaatgcggtataacgcccgggcggcttcaacattgagccctgccttgcgtaaatcccgattattgcgtaacgcgatcgcaatcagttcctgtagaagcggatcgtggaagaaatcacgccagccaatgtcagcggcatccggcgcgccagaaacggttgacgttgcgtagggatagaccatcgcagtcggcgatgcggggcgttcgtgcttcggcgccatcgtacagccagcaagcgtggtgacgaaagcaagcgtcgccagcgtggcggtctgccgatagcctgtaaaagtgatcttcattatgccattcccatcattatgcttgctgatcatgcgaatcaacgcggttctcacgctttaatgccatcctgcgaaccaccacgtaaaatacaggcgtcaataacaggccgaagagcgtgacgcccaacatgccggcaaacacggcgatgcccatcgcatgtcgcatttccgcgccggcacccgtcgcgagtaccagtggtactacacctgcgataaaggcgaatgaggtcatcaggataggacgcagacgcaggcgggacgcttccagtacggcggtcagcgggtctgcgccgtcgtgttctttggcgcgggcaaactcgacaatcaaaatggcgttcttggccgccaggccgaccagcaccacgaaaccaatctgcgtaaagatattgttatctccgccagatacccacacgccgacaatggctgagagtaatgacataggcgcaataagcaggacggcgaagggcagcgaccaactgttgtactgcgccgccaggatcaggaaggccagcagcaccgccagcgcaaagatagcaagcgcagagttgccggcctgtttttcctgataaaccagatcggtccattcgaagaccatcccttccggtaacgtttcacgcacgatcttttcaatcgcgtccgtcgcctgtccggaggagaagcccggagccggtccaccgctaatatctaccgaggggaagccgttgtaatggatgattctgtccggccccgactggcgcataatcgtgacgaaagcgctaagcgggatcatctcgcccttcgcattgcggactttaagcaggccgatatcctcttgctgcatacggaatggcgcatcggcctgcgccatcacccgccaggcacggccaaatcggttgaaatcgttgacgtaaagcgagccgaggttaatttgcaacgtttcaaagatgtcggtgagcgatacccccattgatttcgcctttacccggtcgatatccacctgtaattgcggggcgtttgtctggaaactggccagcatattggccagttcgggcgtctgcatcgccttagacataatctcgctttgcacctttgtcatcgcttcaaatcccagttccgcacgatcttcaatctgcaatttaaagccgcccgtcgcgccaagccctggaaccggcggtggcgggaagatgccaataaatccgtcgggaatgtggctaaatttgtgcattagctttccggcgatagcgttagcggaaagcgaaggatcttcacgctcgtcaaagggtttcagcatggcgaacatcagcgccgaatttggcacatttaccgggccgttaaccgacagaccggggaagacgacgacgctttcaacgccgggttccgccagcgcgatagcggacatctgtttcacgaccgcctctgtgcgatccaacgatgcgccgcttgggagctgggcgatgccgacgagatagtatttatcctgcgcaggcacaaacccgttcggcacctgatggaagccaagccaggtcagccccacaaagccagcatagagcaccatcacaatgacgctgccgcgcacggcccgacggacggcgctaacatagcggttcgacgcgctgtcgaagaaacggttaaagcgatggaaaaaaccgccagtgaccgtgcccatcaaccgcgttagccagtcagccttcgcagtatcgtggtgcggtcttagcaaaatggcagccagcgcaggggagagcgtcagcgagttaatggccgaaaggatggtcgaaatagcgatggtcaacgcgaactgacgataaaactcaccctgcaggcccgccaggaatgcggaagggataaagaccgccgttagcaccgaggtaatagaaagaatgggaccagtgacttcatccatcgccttctttgccgcctctccgggacttttgccctgcgagatatgccgttccacgttttcgaccacaacgatggcgtcatcgacaacgatacctatcgacaggaccaaaccaaacagcgaaagcgtattcagcgaaaagccaaacaggtgcatcaaggcaaaggtgccgaccagcgaaacgggaaccgccaccagaggaataatggacgcccgccaggtttgcaggaacatcaccacgacaaggacgaccagcacgagggcttccagcaacgtaatcgccaccgattgtagcgatgcgcgcacgaagaccgtaggatcataggcaatccggtattcgatatcctgcgggaagttttgctgcaactcatccattttgccgcgaatcgcgttagaaacgtcaatcgcattggcgcccggactttgaataatctgtaacgctggcgccgcttcgccattcagtaaactgcgcagcgtataggcatctgcgcccagcgtgacgcgggcgacatcacgcagacgcgtcacctcgccgtcagcgccgatttttaccacaatctcgccgaactgttcttcgctggtcaggcggcccagcgtgtttaccgtcatctgaaaagcggcggaggcctccggctgttgcccgacggaaccggcggcgacctgtacgttttgttcccgcaacgccgtaacgatatcactggcggtaagaccgcggttggcgattttcgccgggtccagccagacgcgcatggcgtactcgcccgcgccccagacgagaacatcgccgacgccgggtaaacgggccagttcgtcgcgaacctgccggatggcgaagttagacaggtaaagcgagtcatagcgtttttgcggcgagacaagatgaaccaccatcaacatatcgggggacgttttctccgttacaacgccaattcgctggacttcttcgggcaggcgaggcagcgcgcgggatacccggttttgcacctgaatttgcgccatatcaggatcggttccctgttcgaaggcgatagagataaccatgcgaccatcaatggccatctgggtattcatatacaacatgccgtcaacgccgttgatcacctgttccagcggcgcggctaccgtatcggcaatcacttgcgggttagcgccggggtagctggcgctaacctgtaccgtgggcggcgtaacggccggatattcactcagcggcagttttaaaaaggcgatagcgccagccagcagcattaacagcgacaggacgatggcgaagatggggcgtgcaatgaaaaagtgggtgaatttcattggcgcaccgccttcggcgcactgtcgccgtccgctttagtcaatgtcgcggtctgtttgtcggtcacattctgccgcatcggcaccagacgtggcgcaacggtcatgccaggacgcaccagccccttgaggatgattttttctcccggcagtactccctgtgtaacgacgcggaatccatcgaccatttgtcccaactcaaccggacgatactccacctgattctccttgccgacgatcagcacatagtttttgccctgatcggcgctcaccgccagatcgtcaatcagcacggtttcccgcggctcgccgatgggcaaactgattcgggcaaacaggccgggagaaagcattccgtcggggtcaggaatcacggcgcgtgcccggatagtgccggtgctgcggttcatctgattgcccataaagtcgagtacgccctgataaggcagcccgttatcggtggttaaccccatgttgactaccggtggatttttgtcggagcgggtatgccgtaacgccttcagccaggtggcttcgtcaatatcgaaatacacatacatgggattgtgagacacgatagtcgtcagaagcgtggcgttacccgctacgccgccgctgaccagattgccccgggtcaccagtatgcggtcaacgcgtccggcaatgggcgcggtaatacgggtccaggagagttcaaggcgcgctgcggcgacggcggctttggccgattgcatctgcgcctgtcgcgcattacgcgtggcggtgacatcgtcagcgtttttacgtgatacggcgccgctggcgaccagtcgttgaatgcgatcgaaatccgcctgcgcctggcgggccagtacttcagcctgacgtaattgcgcgacggcggtgtcgagggcgacctcgaacgggcgcggatcgatctggaacagcagttgtccgcggcttaccagacgtccttccggaacgctgatggcgtcaagggttcctcccacgcgcgaacgcagctccacggtttccggcgcggccagaaaaccggtgaattccgccgtaggcgcgagtgtacggctaagggctttagcaaccggtaccgacggtggaggcggcgcgctggccggggggccgacggcgttgtctttatcccatagtgcttcgccggccatgtaaatcacgcccccgatggcggcgatgacgccggctatcaacataattttgaatgttctacgcatgtcgtttccctctttaccgcagcgtgtcggccattccgcaacgctgccgcagaatttttggcaaaggctaggcgttacaacgaaggaaaggtcaagcgttcctgacgggtttttacggggcgtgggtcggcatcgtggcgtaaatgtctcgcatcatcctcttttatgagccatctcacattctcgccgaaccgtgcagcctgaatacgcttgaccttcccacaatggcaagctttaggctttctgataccgaatagtcaggatggggaagtcgtcatgagtcagtcagaaaatcgtcacgacacgataagcttacttattgaaggtatgacctgcgcgtcgtgcgtcgctcgcgttgaaaaaggtattaaggctgtgcctggcgtaacggacgctacggtgaatctggcgacggagcgcgccaccgtccgcgggacggcgtcggcggaggcggtgatcgcggcgattgaaaaaacggggtataaggcgcgaccgatagagacggcggggcagggcgaagacgactctgaagagaaaaaagaggccgagcgcgtcaggctgaagcgcgatctgattctcgccagcgtgctggcgctccccgtttttgtgcttgaaatgggctcgcaccttattcctggtatgcacgagtgggtgataaaaacgattggcctgcaacaaagctggtactggcaatttgcactgaccctgttggtgctgacgatccccggtcgccgtttttaccttaaagggttcccggcgctggcgcgtctggcgccggacatgaactcgctggtcgccgtgggaaccgcagcggcattcggctactcgctggtggcgacctttacgcccgacctgttgcctgaagggacggtaaacgtctattacgaggccgccgcagtgattgtcgcgcttattctgctggggcgctttctggaggcaagggcgaaggggcggacttccgaagcgattaaacgtctggtggggctacaggcgcgggtcgcgcatgtgttacgcgagggccgcatcgtggatatccctgtcgacgaggttgtgctgggcgactgtgtggaggttcggccaggcgagcggatcccggttgacggcgaagtgaccgaaggccgcagcttcgttgacgagtcgatgattaccggcgaaccgataccggttgagaaatccgcaggaagcgcggtggtgggcggtaccgtaaaccaaaaaggcgcgctcacgctgcgggcgaccgccgtcggcggacagaccatgctggcgcaaatcattcgtctggtggaacaggcgcagggttcaaaactgccgattcaggccgtcgtggataaagtgacgctgtggtttgtcccgatggtgatgcttattgctgcgctgacctttgtggtatggctggcgtttgggccgtcgccagcgctgactttcgctctgatcaatggcgttgcggttctgattatcgcctgtccttgcgcgatgggcctggcgacgccgacctctattatggtgggaaccggtcgtggggcggaaatgggcgtgctgttccgtaagggggaggcgttacagctactcaaagacgctaaggtggtggccgtagacaaaaccgggacgcttaccgaaggccgcccggtactgaccgatctcgacgtggccagcggctttgaacgccgtgaggtgctggcgaaagtcgcggcggtagaatcgcgttcagagcatccgattgcccgtgcgattgtcgtgtcggcagaagaggaagggatcgcgctaccaggcatgagcggcttcgaatcggtgaccgggatgggcgtatacgctaccgttgacggtacgcgtgttgacgtgggggctgatcgctatatgcgcgaaattggcgtggatattagcggcttcgccaccaccgccgaacggttagggcaggaagggaaatcgccgctctatgcggctattgacggtcaactggcggcgattatcgccgtggccgatccgatcaaacccagtacgcccgccgcaattaacgctttacatcagctcggcattaaggtcgccatgatcactggcgataatgcccgcacggcacaggctatcgccagacagttaggaattgatgatgtggttgccgaggtattgccagaagggaaagtcgaggcgatacggcgcctgaaagcggcgtatgggcaggtggcgtttgtcggcgatggcatcaacgatgcgccagcgctggcggagtccgacgtggggctggcgattggcaccggcaccgatgtggcggtggaatccgccgacgtcgtactaatgtccggcaacctgcaaggcgtgccgaatgctatcgcgctgtctaaagcgaccatccgcaatatccaccagaatctgttctgggcctttgcttacaatacggcgctgattcctgtcgcggcaggcgcgctatttccggtctggggcatattattgtcaccggtattcgccgcaggggcgatggcgatgtcgagcgtgttcgtgctgggcaacgctttgcggctgcgccgtttccgggcgccgatggcaaccccatccgacacatccacgacatgaggaggagcgtcatgaacatcggtaaagcagctaaagcatcgaaagtctcggccaaaatgattcgctactatgaacagattggtctgattcccgcggcaagtcggacggattccggctatcgggcctatacccaggctgatgttaatcaattgcattttatacgccgcgcgcgcgacctcggtttttcagttgctgaaatcagcgacttactgaatctttggaataaccagtcgcggcaaagcgctgacgtcaaacgcctggcgcagacgcacattgatgaactggacagacgtatccagaacatgcagcacatggcgcaaaccctcaaagcgctgattcactgctgcgccggcgacgcgctgccagattgccccattctgcatacgcttggacaacctgacgatagcgagccggaggcgcgtaccggagcggtattgcgacgtcctcgtcgccacggactggcaaagcgtctgtaagtcctgagattacgcttgaccttccaacactggcaaggtccagactggcaacagttcccacacaaaaggagttcactatgcagttccatattgatgacatgacctgcggcggctgcgccagtacggtaaaaaagacgattctgactctcgatgctaatgcgacggtgagaactgacccggcgacgcgtctggttgacgttgaaacgtcgctatccgcggagcagattgccgccgccctgcaaaaggccggtttcccgccgcgcgagaggtaatcgtcaatggcgatcggtctggcgacaggccggtcgcgatacgctagccacgcttcgcttttctttgcgtgagataatccccataaaaagtgtgacaaatcatgtgtcagtaagctttgttaataatatgtaatgatttgtctatttttgctaacattttacctgctatatacaaaaagataacaaataagtagcgcaacgctaccttgttacgtcgctttgacgacgggagcgctccagcgtttcgcccgcttcaaagcttgatgttattttttgatgcaggacactacctatgtacacccccctgaactggacgacgacacaacgacatgtggcgtttgcctgctttaccagttggatgctggatgcgtttgatttctttatccttgtctttgtacttagcgatctcgccgaatggtttcacgcttccgtatcggacgtttccattgcgattatgctgaccctggcggtacgtcccattggcgcgctgctatttggccgaatggcggaaaagtacggacgtcgaccgatactgatgctcaatattctgttttttacggtgtttgaactgctttccgcctggtcgcccaccttcatggcatttctgatttttcgggtcatgtacggcgtggcgatgggcgggatatggggcgtcgcgtcatcactggcgatggaaaccattcccgatcgttcgcgtggcctgatgtcgggcatttttcaggcgggctatccctgcggctatctgttcgcctcggttatttttggcctcttctacagtatggtaggctggcgcggtatgttcctgattggcgccctgcctgttgtcttgctgccttatatctggtttaaagtgccggaatcccccgtctggctggcggccagagcgcgtaaagagaataccgcgctgcttcctgttctgcgcaaacagtggaagttgtgtctgtatctggtgctggtcatggcgttctttaactttttcagtcacggtacgcaggatctctatcctaccttcctgaagatgcagcatggttttgatccgcatctgatcagtatcattgcaattttttataacattgccgccatgctcggcggtattttctacggtacgctatcggaacgtattgggcgtaaaaaagcgatcatgatcgccgcctttcttgcgcttccggtactcccgctatgggcattttccagcggatcattcacgattggtctgggcgcgttcctgatgcagtttatggtgcagggcgcctggggtgtcgtgccgacctggctgaacgagctggttccggcgaatgcgcgcgccgtgctgccagggtttgtttaccaactcggtaatttactggcgtcggttaatgcgacgttacaggcccgcatcgcggaaacgcatggtggcaattacgggttggcaatggcgatcgtggctggcgcggtggctattttaatctgtgtatttgtggcatttggtcgcgagacccggggagtcgtcatctccggtacagatagcgacgccctcccggagtcggccatcagtcatcgcacgtaaacactacgctcctggcgcatactgtcgccgggagcacgccttcctcccgtcgttttcacgccctttcaacgaacaacaaaggttaatgatggcatctgccgttcgtgaccattacaatcatcgcttacttttttctttataagaaattgattgctgcaccttaaaattatcaacggagcgaagatatcatgttgaaagataaccaaaaacacaacgagtctgttgccccgaatagcgcctttctgtctgagttacaacgtgcattaccggaattttttaccgccgatcgctataacgagcagggcgaactgatcgcgaaaggcggatttgatctcgccagatttgagcgcgcgctgaaagcgcgtaatattgatgagctgactagcggttatcagattgattttattggcaaagattacgcaaaaaaacaggcgggtgaaaaatccgttaccgttatcgttcctgacgtggaacacaatactctggcagaaaataaaaacagccataatctttttctgaccggagataatctggatgtgttacgccatctgcaaaataattacgccgataccgtcgatatgatctatatcgatcccccttataacaccggatcggacgggtttgtctatcccgatcattttgaatatagcgatcgggcgttgcaggatatgtttggtcttaatgataccgaactggcacgtttaaaatccattcagggtaaatcgacgcactccgcgtggttatctttcatgtatccgcgtcttttcctggccaggaagctcctgaaagataccgggtttatttttatctctatcgacgataatgagtacgccaatcttaaattaatgatggatgagatttttggcgaaggcggatttgtcaccaatgtgatgtggaagcgcaaaaaagagatttctaacgactctgataacgtttccatccagggggaatacattcttgtttatgccaaaaccggtcagggcgctttacgtttagaaccgctttctaaagagtatattcagaaatcctataaagaaccgaccgaacagtttccagaagggaaatggcgaccggtgccgttaacggtgtcaaaagggctgagcggcggcggctatacctataaaattaccacgccgaacggtacggtacacgaaagactatgggcttatcctgaagccagttaccaaaaactggtggccgataatctggtctattttggcaaagataacggcggtattccccagcgagtcatgtacgcgcatcacagtaaggggcagccaacgaccaattactgggataacgtagcgtcgaataaagaggggaaaaaggagattctggatctcttcggcgacaacgtttttgatacgccgaaaccgaccgcattattgaagaaaatcatcaagctcgctatcgataaagacggcgtcgtcctggacttttttgccggttccggcactacggcccatgcggtaatggcgctgaatgaagaagatggggggcagcgcacgtttattctgtgtactatcgatcaggcattaagcaataacactatcgcgaaaaaagcaggttataacactattgatgaaatcagccgcgagcgaattacacgcgttgcggcgaagatccgcgccaacaatcccgcgaccaatagcgatctcggttttaaacattatcgttttgccactccgacacagcagacgctggacgatctggatagcttcgatattgctaccggccattttatcaataccagcggtcaactggccgctttcaccgagtcaggatttaccgacatgatcaatcctttttccgccagaggattgggcgtgccgggcggcgcaagcggcgaagagaccttattaacgacatggctggtcgccgatggttataaaatggatattgacgtacagaccgttgatttttccggctattgcgccaggtatgttgataatacgcgcctgtatctgattgatgaacgatggggaacagagcagacccgcgatcttctcaaccacattggtacgcaccagcttccggttcagaccattgtcatttacggctactctttcgaccttgaatccattcgtgaactggaaatcggcttaaaacagcttgatcaaaaagtgaacctggtgaagcgttattaagaggggatgatgatgaatattttactggaagaacttccccatcaggaacaggcgttagcggcgattctggcgagtttcaccggtatcgatcacgcgcaagccgatcataatcactatgctaatccgctgattaaggaacgttacgacgataaggccaatattgacgttaaaatggagaccgggacgggtaaaacctatgtctatacccggttgatgtatgaattgcatcagaagtatggcctcttcaaatttgtgctggtggtgccgacgccagccattaaagaaggcgcgcggaactttattaccagcgattacgccagacagcatttttcacagttctacgaaaatacgcggatggaactttgcaccatcaacgccggtgattttaaagtaaagtcggggcgtaaaaattttccggcccagctattaagttttactgatgccagccgtcgtgatagccatacgattcaggttttgctgatcaatgcgcaaatgctcaattccgccagtatgacgcgagacgattacgatcaaacgctcctgggcgggctgacgtcgcctgttaaagggctgcaaatgacgcgaccggtggtcattattgatgaaccgcatcgttttgcgcgagataacaaattttatcgagcgattcaggctattcagccgcaaatgatcgtccgctttggcgctaccttcccggatattgtcgaaggtaagggtaaaaataaatgtgtacgtaaagattactatcgccggcaaccgcagtttgatctcaacgcggtggacagttttaacgatggtttggtgaaaggtattgatatttattacccgaatctccccgaagaacaggccaacaatcgttatatcgttgacagcgtcacggcaaagaaattaatcctccgacgggggagcaaaattgccgaggttggcgtgggcgaaaatctcgccgatgtcgatgcaggatttgaaggcagtatcgaatatgccggcagtaaaatgttgtcgaacgatctggagctggaggcagggatggcgctggtgccaggaacctttggcgcgagctaccaggaactgattattcaggacgctatcgataagcattttgacactgagcaggcaaatttcttacgcagcaatgagccagaaaataatgccccgcgtattaagaccttaagccttttctttattgacagtattaaaagctatcgtgatgacgaaggctggttgaaagtcacttttgagcgtttgctgaaaaagaaactgacgcaactgattgacgattatcagcgcaagaccctgccgcgagaagtggagtatctgtcgtttctgcaggccacgctcgccagcctgcactcggataaccaaaacgtccacgctggttactttggcgaagaccgcggaagcggtgatgaggcgatccaggctgaggtagatgatattctgaaaaataaagagaagttgctcagtttttcagaccatcacggcaactgggaaacgcgccgctttctgttttcaaaatggacgcttcgcgaaggctgggataacccgaatgtttttgtcattgctaaattacgttcttccggtagcgagtcgagcaaaattcaggaagtggggcgcggcctgcggctaccggtagatgaaaatggtcatcgcgttcatcaggaagagtggccgtcccgactgtcgtttctgattggttatgatgaaaaagcgtttgccagtatgctggttgatgagattaatcgcgacagcaaagttcagcttaacgagcagaagctggatgaggcgatgatcacactcatcgtcaccgagcgacaaaaagtcgatcctgcgtttacggagcttcgtttgctggaagatctggatgataaaaaactgatcaaccggagcaatgagtttaaacccagcgtcacgcttaacggggaaaccaaaagtggttttgcgtggctactggagttctaccctgagctgacgcaggcgcgggtgcgagcggatcgcattcgtgacaataagcccgcctcccggctgcgagtcaggttacgcaaagagaattgggaacaacttagcagtatctgggagcagttttcccgccgttatatgctgcaattcgagcgtagcggcgcttctctggaacaaattgccgccgaggtgctgcgcgatccggcgctgtatattcgccagaagccaagccaggtgcaacaacggctggtatcgaatgaagataatggccgttttgaagtggcgcagcgggaaggcgaattagccgccagcgaatttatggcgggcatgaaatatggccattttcttaagcaactggcgttacgcaccagtctgccggttaacgtcctgcacccggtgttaatggcgatgctgcgtgatgttttgcacggagattcacgctatttaagcgagatctcgttggacaatatgacccgcgcattacagacgcggattaatgcgcattttgcgcagcgccacgattatctgcctctcgattttcaggcttcaacgtcggtatttgattccacggcacggcagttcagagaggagattagcgctgaaattgtggggaaaaatgtggatgagaatgcgatagacgatccccgttctctctatcaaataccgccgttgcgttatgacagcgtcgatccagaattgccgctattaaaatacgattatccgcaacaggtttctgtgtttggcaaactgcctaagcgggccattcagatccccaaatatacggggggctctactacgccggattttgtgtaccgtattgagcgtcaggacgccgacagcgtttatttactggttgaaactaaagcagaaaatatgcgcgtaggcgatcaggttattcttgatgcgcaacgtaaattcttcgatatgctgcgtcggcaaaatatcaatgtcgagtttgcggaagcgaccagcgcgccggcggtattttctacgatcaatggcttgattgaggggaaggcaaactaacgggtttgaatgaaccttaacggttatctttttgatagaccatataaaatggccgccgcgcagcgagcgttgcggtcattctccctgtgctaatcccccgtcccgtaaaccgcgttgacttgaaggttatcgttttacgtctattcttaactttcagctacgcgtattttgctgaaattgcaaatagtcttgaagacgctgtttttttgttttgccgttatttttataacggccaggtagatattgccaagtgaatgtaactaagggagacatgttatgctaaatagatactaccgtttcgctgtcgaaaaagacgacccctccgaagcgccagagtcgggcgataagcctgacagccagccgcaaaaaaaatcgtaatttatctggatattccccgacgtttatacgtttggggaaaataaccgtttcgtttcaacctggttgcgaacagtgaatattttacacgaagtgactatatataaacgggagggaacatggagtttgatgccttctttttagcgagactccagtttgcctttaccgtctcttttcatattattttccccgcgattacgattggcttagccagttacctggtggtactggaaggtttatggctaaaaacgcgtaatcctgtctggcgctcgctctatcagttctggctcaaaatttttgccgtcaacttcgggatgggcgtggtctccggtctggtcatggcttaccagttcggaacgaactggagcggtttttcccagttcgccggcagtatcaccgggcctttattaacctatgaagtgctcaccgcattcttcctggaagcgggattcttaggcgtgatgctttttggctggaacaaagtcgggccgggtctgcatttcttgtctacctgtatggtggcgttgggcacgttaatgtcgacgttctggattctggcgtctaacagctggatgcataccccgcagggatttgaaattcacaacggtcaggtagtcccggtggactggttcgcggtgattttcaacccgtcgttcccgtatcgcctgttgcatatgtccgttgcggcgtttttaagtagcgcgatgtttgtcggcgcgtccgctgcctggcatttactgaaaggtaacgatacgccggctatccgccgtatgttctcgatggcgttatggatggcggtcgtggtggcgcccgttcaggcattgattggcgatatgcatggccttaacaccctgaagcatcagccggtcaaaatcgccgcgattgaggggcactgggaaaatacgcccggcgagccaacgccgcttacgctggtaggctggccggatatggaggcggaacggacccgctatgcgcttgagatcccggcgttgggcagtctgatcctgacgcatagcctggacaaacaggtgcctgcgctaaaagattatcccaaagaggatcgccccaactctaccgtggtgttctggtctttccgtctgatggtgggcatgggcgtactgatgatcttcctggggctggccagcctgtggctacgctaccgacgccgactgtatcattcgcggccctttatgcactttgcgctgtggatggggccgtccgggcttatcgccatccttgccggatgggtgacgacggaagtaggacgccagccgtgggtggtctatggcctgctgcgaacgcgtgatgcggtttccgcgcacagtaccttgcagatgagcatcagtttgctggccttctttgtggtctattccctggtctttggggttggctatatttatatgattcgccttatccagaaagggccgcagccggcggagacaccgaccgctgaaaccgatggcagacccgcgcgtcctatctctgccgtgggagaatcgcttgagcaggagaaacgcgaatgaccatcgatcttccggttatctggtttgctattatcgtgttcgccacgctgatgtatatcgtaatggatgggttcgatctgggcgtcggtatcctgtttccgtttattcgtgataaacacgatcgcgatgttatggtgaactcagtcgcgccggtatgggacgggaacgaaacctggctggtgctgggcggggccgggctttttggcgcgttcccgttggcttatgccgtcatcaccgacgcgctgactatcccgctggtggttatgctgcttggtcttatctttcgcggcgtcgcttttgaattccgttttaaagccaccgagtcgcatcgcgcgttctgggataaatcctttatcgtcgggtcaatcctggcgacctttgcccagggggttgtggtgggcgcggtggtgagcggttttcaggtggaagggcgaacctttagcggttcgcagcttgactggctgacgccgtttaacctgttctgcggcgtcggtctggttgtcacctacgcgctgctgggcgctacctggctgattatgaaaagcgaagatccgctgcatagccggatgtgcgcgctgtcgcgcccgttgttgatcgtcttgttgttggtgatgggaggcgtcagcgtgtggacgccgctcacccacgacgacatcgccgagcgctggttcacgctgcccaatttatactacttcctgccggtgcctgtgctggtgttggcttttagcgtctggctatggcgcagcgtgaaaaaaccagaatcccatgcgcgtccatttattctcacgctagggctgatttttctggggttcagcgggttaggcatcagtatttggccgaatattattccaccggatatttcgctgtatgccgccgccgcgccgccgcaaagtcaaagctttatgctggttggggcgctgataatcatcccgattattctggcttataccttctggagctactacgtcttccgtggaaaagtgcgacatggtgagggatatcactgatggttaaagtgaaaaaatggtcgcggcgagtcgtatggatggtcgcgatatggtgcgccagcgtgcttctgctggcgggcgtcggaatgttattcagactgctcatgacctccgcaggatttcgctcctgactgatacccccggacgcgctttcgtcgctggcgaaagcgcgtttttatcgacagatcggcgtttatcgatcacctttgctcgccttatctctcccctcaatagcggttgataattattctcatctttattgtcgttcccgggccgcagtgatatggttacacagtggctaacgctctggtataacgcagataaacggtattgataatgtctccgatctcctgtcactcttccgccgccccggcgatgaaaaagatcttttccgtcagcgacttcatcgcgtttggcgagcgttatggcattgattaccgcttccctgcgttaccgcagtatacgcagagtagtcccgtacttcatggcgatatcgaagagatagcgcttcccggcgggatttgcattacacgctcggatgttcacgtgttacaaccttatgaaaccacctctcgccatagcagtccgctgtatatgctggtggtgttggaaggtaacgtcgcgctggctgtcaatgagcagacctttttgttgagcgcggggatggcgttttgctcgcaactgagtgagcagcagacgatacgcgcccatcacggcgcagacagtaaattgcgcaccttgtcgctgggaatgtacccggacggcggatggcgggagcgtttgcctgtctcgctggcagacgagtgggaaaatagcgcaacctcggcgagggtctggcaggtgccggagtttctgctttcggggctacgttatgcgcagcagcccggacctcatgcggcgtcacgccagttaatgctggaaggcatcatgctgcaattgctgggctatgcgctaaatctatgtcagccggcaacgcaaaaacgcgggcttcccgtcaccggtgaataccagcggctggagctcattcggcgtttactggagcagacgccggaaaaagcctacacgctgaacgaactggcgcgtcgggcggcaatgagtccaagtagcctgcggtgcaagtttcgccatgcctatgggtgtaccgtgtttgattatctgcgcgattgccgcctggcgcgcgcgcgtcgttatctgatggagggatacagcgtgcagcaggccgcctggatgtcaggctatcaacatgccactaactttgcgacggcattccgtcggcgttatggctgctcgcccggcgagctgcgtgacgcgtctcttacggcgtcccgccactgtgcgtaacgcgccccgccagagcggtaatatccgccgctaacccggttttctgccgctttgggtgattttttatcattgcgcataggcaatctggcgttacgcatagtggtccgtcatctctaaaaggtaataattcttatttacaataaagatgcctttggagatgttcatgtttgcgacaacgcgtatggcgctattgataggcggagctatcggcggcgcgacttttcctctttttgcccaggaaaccacaaaaaatgataccgtcattgtcacctcgcccgttcagagtggcgcgaccaagctggcgacgccagatattgaaacgccgcagtcggtatccattattacccgccagcagtttgaagagcagggcgcaaccagcgtgcgtcaggcggtcagctacaccccaggcgtatacagtaaccagataggcgcctctaaccgctttgattacatcgtattgcgtggtttttcggacggtagtctggataacgtctatctcgacgggttaaaaatgatgggcgacaccaattcgcacagttcgttggtggttgacccctggtttctggaagatatcgaggtggtacgcggcccggcgtccgttctgtatggacgttcatcgccaggcggcattgtcgcgctgacgtcgcgaaaaccggcgtttgatgccggaggagaagtgaagctgtttgccggcaataacaaccagcgcggggcggcttttgatgtgaccggcccactggatgacaatgaacgtgtggcggcgcgtcttagcggcatgacacgttacgccgattcgcagtttacccccttgaaagaggaacgttatgcgctgatgccgagcctgacctggcgaattaccgatcggacgcgtcttgatcttatggcctatccgcaccgtgatccggaaggcggtagccactccggactgccttatcaaggcacggttgtaccttataacggcggaaaaatttctaacactttctttgaaggtgaagatgactacgacaaatacgatcgccgtgaaaatatggtgggttataacattgagcatctgttcgataacggctggtcggtacggcaaaaattgcgctatttgcataccaaagtgacgttgaatcaggtctatgccgcaggttggttgaatgaaacggcgctgaatcgcggctattccggctccggggagaaaatgtcggctatcgcgctggataatcagctcgacggcagcgtggataccggggcgattaatcatcgtctgctggtggggatcgattatcaggatcgcagtaaccatactactggctattatggcgcgtttccgccgattgacgctttcaaccctgtttatggcgctcagccggattacattacgttgtatagccgtgaaaaacataagctgcggcagaccggatactatttacaggatcagatgtcatgggatcgctggcgctttacgttgggcggtcgttacgatcgggtcagcgtgtctaacatcgacaaacttcatgattcacgcagcgatctcgataaaaacaacgtcagtacccgtgctgcgttgctttatctgttcgacaatggcgtcgccccctatctcagttattctaccgcgtttacgccgaccagcttcgccgacgaaaacggcaatgtgctggaaccgatgaaaggcaagcagtgggaggcgggggtaaaatacgaaccgccgggggggaatagccagtttagcgccgccgtgtatcgtattaatcagaccaatatcgcgaccaaagaagaacctaccgatccgtaccgctcgattggtgaaattgagtctaaaggggttgaactggaggccattagccatttgtcggatagcgtccgtttgcaggcggcgtatacctatactgatatccgttataagaaaagtagcccgcaagaacagggtaagcgcgcggtttatgctccacggaaccaggccagcgcctggctaagctacgatgtgaaaagcggtctgttagaggggctgactttgggctccggcatccggtacgtcaacggcgtgaccagcgatcgcctgaatacccacacattgccgtcctatacactggtcgatatggtggtagggtatgatttatccagcattgggttaaatggcttgagcgcccagctcaacgtaaataacctgacggacaaacgctatgtcgctgcctgtaattcgctctcttattgttattttggcgccgagcgtagcattgtaggcagcgtgtcatgggcgttttgataacgcttatcgtccggtagcaaaggctaccggacaaacattagcggtgcgtcacgccttcatagagaagtctgagcgcaaacatcccgataatggcgccgataacacggctggcaatgcgctgtattcgtccataagcgcggcggactgcggggagcgaaaaggcctggctgagaaaaatacgccagataacggatgacagcacaattccggcccaggccattaaccttgcccatgtgggcgtttctgcgctaagcgttacggaaaaaatactgataaaaaacagtacggtttgcggattggataaatcggtcattaatccccggcgaaagaaaattgtccacggggcggcaatcggcgtctggagcgtgctcatttgcggcgtcgcctggtggcgaatactgttccaggcgaaccataataaataggcgccgccgacaattttgataagagaaaataccgcttcgcattgcgtaatgagcgtcgccagaccgaaaagccccagcccggaataaaaggcgtctcccgtggcgacgcccaggccggtgatgactcccgcccggcgtcctgatgcgaggctggtttgcaccaccacaaacagattcgcgccgggattaaaaaaggttaacacaaacagactgacggtaagcacaacggcatgaaacggctccatagacaactcttcccatagcctcaagaaataacgttcatcttattaatagtcaaaccagatgattgcgagtgagatcacaaagcaggggcgttttaatccgcgttgttacgccgacagagcgggggctgactggatttttccagtaatctacactacttatttaatcagtccgaacggcctttttgttctgataaagcgatgatggcgtaataataaaacgagggttttgctatgaaaactggctacaaggttatgcttggcgcattagcgtttgtcgtgacaaacgtttatgccgcagaaatcatgaaaaaaacggactttgataaagtcgcctccgaatacacgaaaattggcacgatttccaccaccggggaaatgtcgccgctggacgccagagaagatttaatcaaaaaggcggatgaaaaaggggcggatgtggtggtgctgacgtccgggcagacagaaaataaaattcatggtacggctgatatttataaaaagaaataaaagcattgcatcataaaaatacccgcctgggtttccggcgggtatatttattcctggcaaccggcatccgttttgccggatgacggcctgcagtaaacgtagcgccatcaggcattcaggacgctgtcatttgtcttaattatccgactggtctttggcaccagcttttaaacgacgccacagagtggtgcggctaatccccagataacgcgccgcggcggtcttatcgcccttaaagcgcgccagtacatcctgtaacgcgttcgcatccacggttgaaggcgtcagttctgctgtgttcaccataagctcaggtaataactgccgcataaattgcctgtccagcgttggcgcgggatcgacgcttaaaaaaagcgccaggcgctccatcatattacgcagttcgcgaatattaccgggccagcgccaggccagcaaaagcggctgacactgtgtcaatccatgacgtatcgattcggtaaacggaatttccatcgccgccagcgactgttttaaaaagctttccgccagcggcaaaatatcagcctgccgctcgcgcaaaggaggaagcgtcagacgcagaatactcaggcgataaaagagatcggggcgaaaacgtccttgcattatctcccgatccagatcgcaatgcgtagcgctgatcacccggacatccaccgggatcggctggtgtccgccgacgcgagtgacggctttttcctccagtacgcgcaaaagtcgggtttgtaacggcaagggcatttcgccgatttcatccagaaacagcgtgccgccgtgtgcgatttcaaacagccccgcccggcctcctcgtcgtgaaccggtaaacgcgccctcttcataaccaaacagttccgcttccagcaacgactcggtaatcgcgccgcaattgacggcgacaaagggaggggatggcttattctgacggtgaggctggcggtgaaagaacgtctggtgaatcgcctgcgccgccagctcttttccggtccctgtttccccctgaatcagcactgccgcacgggagcgggcatagagcgtaatcgtctggcggagctgctccatttgcggcgactggccgcgtatatcgcccagttcataccgggtttgtaatcccttgccggatgggtaatccacgcgctggcgccgtgtcagacgggtcatatccagcgcatcatgaaaagcctgacgaacggtcgccgcggaataaataaagatggcggtcattcctgcctcttccgccagatcggtaattaatcccgcgccgacgacggcctcaataccgttggccttaagttcgttaatttgcccgcgcgcgtcctcttcggtgacatagcttcgctgttcaagacggaggtgaaacgttttctgaaaggcaagtaaagccggaatggtctcctgataggtcacgataccgatagacgaggtgagctttcccgctttcgccagcgcctgtaatacatcgaatccgctgggcttgatgaggatcaccggtattgacaggcggctttttaaataggccccattcgaacccgccgcgataatcgcgtcgcagcgctcggtcgccagttttttgcgaatgtaggtcaccgccttttcaaagccgagttgaataggcgtgatggtcgccagatgatcgaattccaggctgatatcccgaaacagttcgaacagacgcgttacggagaccgtccagatcaccggtttatcgctattatcgcgcggagcgctgtgggcagtcgtcatcgcagtagattcatctttaaggggcgattttttgttttaaacgtgtttcataaatgttgcaatgaaacagggtgattcgtttcatgaaacgttagctgacacgtttttttttcccttaatcgcgcttattcataacagaaatgactgtaattacctgtttttaaatctcattgtatttaattttctcgctgcctctttgcctggcatagcctttgctttggtgaatacatcttgaataacaatttactaacatgaggacgagatatgtctttacattcgccggggcaggcatttcgcgccgcgctcgctaaagagaatccattacaaattgtcggcgctatcaatgccaaccatgctctgttggcccaacgggccgggtatcaggctatctatctttctggcggcggcgtagcggcgggctcgctcggactgccggatctggggatttctacgctggatgatgtgttaaccgatatccggcgcatcacggatgtttgcccgctgccgctgttggtggatgcggatattggctttggctcctccgcctttaatgtcgcgcggacggtaaagtccatagccaaagcgggcgccgccgcgctgcatattgaagaccaggttggcgctaagcgctgtggacaccgtccaaacaaagcgatcgtctcgaaagaggagatggtagaccgaattcgggcggcagtggatgcgcgcaccgatccgaactttgtgatcatggcgcgtaccgatgcgctggcggtggaagggctggaggcggctctcgatcgtgcgcaggcttacgtggacgcgggggctgacatgctgttcccggaggcgatcaccgaactgtcgatgtaccgccggttcgccgacgtggcgcaggtgccaatcctcgccaacatcactgagtttggcgcgacgccgctgtttacgaccgacgagttgcgcagcgcacacgtggcgatggcgctctatccgctgtcggcgtttcgcgccatgaaccgcgccgcagaaaaagtctataccgtgctgcgccaggaagggacgcaaaagaacgtgatcgacatcatgcagacccgcaacgagctgtacgaaagcatcaattactaccagttcgaagagaagctggacgcgctgtacaggaataaaaaatcgtagcctgtaggcctgataaggcgaagccgccatcaggcaatgccggatggcactacgtttaacccgcctacggtacggcctacacgcctcaataccctacacattacaataatgacgaggacaatatgacagacacgacgatcctgcaaaacaacacgcatgtcattaagcctaaaaaatcggtcgcgctttccggcgtacctgccggaaataccgctctgtgtaccgtgggaaaaagcggtaacgatctgcactatcgcggttacgacattctcgatctggcggagcactgcgaatttgaagaagtcgcgcatttactgatccacggaaaattaccgacccgcgacgagctgaacgcgtataaaagcaagttaaaagcgctgcgcggattacccgccaatgtccgtaccgttctggaagcgttaccggcggcctcgcacccgatggacgtgatgcgtaccggcgtctccgcgctgggctgcaccctgccggaaaaagagggacataccgtctccggcgcgcgcgatattgccgataagctgttggcctcgctcagctctatccttctttactggtatcactacagccacaacggcgaacgtattcagccggaaaccgacgatgattccatcggcggccatttcctgcatctgctgcacggtgaaaagccaacccaaagctgggaaaaggcgatgcatatttcgctggtgctgtatgccgagcatgagttcaacgcctcgacgtttaccagccgggtgattgccgggactggctcggatgtctactccgcgattatcggcgcgattggcgcgctgcgcggcccgaaacacggcggggcgaatgaggtgtcgctggaaattcaacagcgttatgaaacgccggacgaggcagaggcggatatccgtaaacgcgtggaaaacaaagaggtggtgattggctttggacatccggtttacaccatcgccgacccgcgccatcaggtgatcaaacgggtggcgaaacagctttcagaagaaggcggctcgctgaagatgtaccacatcgccgaccgtctggaaacggtgatgtgggagaccaaaaagatgttcccgaatctcgactggttttcggcggtctcctacaacatgatgggcgtccctaccgaaatgttcaccccgctgtttgtcatcgcccgcgttaccggctgggcggcgcacattattgaacagcgtcaggacaacaaaattattcgcccctctgccaactataccgggccggaagatcgtccgtttgtctcgatagacgatcgttgctaactcactcttattaaaaataaaacgcaggaaacgtaccctatgtctacccaagaactgaacatccgcccagactttgaccgtgaaatcgttgatatcgttgattacgttatgaattacgagatcacctcaaaggtggcgtacgacaccgcgcattattgcctgctcgacacgctcggttgtggtctggaagcgctggaatacccggcctgtaaaaaattgcttgggccaatcgtgccaggcacggtggtgcccaacggcgcacgcgtgccgggcacccagttccagctcgatccggtacaggcagcttttaacattggcgcgatgatccgctggcttgattttaacgatacctggcttgccgccgagtggggccatccttctgataacctcggcggtattctggcgacggctgactggctgtcacgcaacgccgtcgccgccggcaaagcgccgctgaccatgaaacaggtattgagcgggatgatcaaagcccatgaaattcagggctgcatcgcgctggaaaacgccttcaaccgtgtcggacttgaccatgtgttgctggtgaaagtggcctcgactgcggtggtcgctgaaatgctggggctgacgcgcgatgagatcctcaacgcggtatcgctggcgtgggtggatgggcagtcgctgcgtacctatcgtcatgcgccgaataccggtacgcgcaaatcctgggcggcgggcgatgcgacttcgcgcgcggtacgtctggcgctgatggcgaaaaccggcgagatgggctatccctcggcgctcaccgccaaaacctggggcttctacgacgtttcattcaaaggtgaaacgttccgtttccagcgtccttacggctcctacgtgatggaaaacgtgctattcaaaatttctttcccggcagaattccactcgcaaaccgccgtcgaagcggcgatgacgctgtatgagcagatgcaggccgcgggtaaaacggcagcggatatcgagaaagtgaccatccgcacccacgaagcctgtctccgcattatcgataaaaaaggcccgctcaataacccggcggaccgcgatcactgtatccagtatatggtcgccgtgccgctgctgttcggacggttaaccgcggcggattatgaagacgaggtggcgcaggacaagcgtattgacgccctgcgcgagaagatcgtgtgttatgaggacccggcttttaccgccgactatcacgacccggaaaaacgagctatcggcaatgcgatcaccgtggagtttactgatggatcacgctttggcgaggttgtcgtggagtatccgattggtcatgcgcgtcgccgcgccgacggtattccgaagcttatcgaaaaatttaaaattaacctggcgcgtcagttcccgactcgccagcagcaacgcattctggatgtctccctggacagagcccgcctggagcagatgccggttaacgaatacctcgatttatatgtcatctgagccagccagcagtaaggcgtaagttcaacaggagagcgtgatgtcttttagcgaattttatcagcgttccattaacgaaccggaggcgttctgggccgagcaggcccggcgtatcgactggcgacagccgtttacgcagacgctggatcatagccgtccaccgtttgcccgctggttttgcggcggcaccactaacttatgtcataacgccgtcgaccgctggcgggataaacagccggaggcgctggcgctgattgccgtctcatcagagaccgatgaagagcgcacatttaccttcagccagttgcatgatgaagtcaacattgtggccgccatgttgctgtcgctgggcgtgcagcgtggcgatcgcgtattggtctatatgccgatgattgccgaagcgcagataaccctgctggcctgcgcgcgcattggcgcgatccattcggtggtctttggcggttttgcctcgcacagcgtggcggcgcgcattgacgatgccagaccggcgctgattgtgtcggcggatgccggagcgcggggcggtaaaatcctgccgtataaaaagctgctcgatgacgctattgcgcaggcgcagcatcagccgaaacacgttctgctggtggacagagggctggcgaaaatggcatgggtggatgggcgcgatctggattttgccacgttgcgccagcagcatctcggcgcgagcgtgccggtggcgtggctggaatccaacgaaacctcgtgcattctttacacctccggcactaccggcaaaccgaaaggcgtccagcgcgacgtcggcggttatgcggtggcgctggcaacctcgatggacaccatttttggcggcaaggcgggcggcgtattcttttgcgcatcggatatcggctgggtcgtcggccactcctatatcgtttacgcgccgttgctggcaggcatggcgactattgtttacgaaggactgccgacgtacccggactgcggggtctggtggaaaattgtcgagaaataccaggttaaccggatgttttccgccccgaccgcgattcgcgtgctgaaaaaattcccgacggcgcaaatccgcaatcacgatctctcctcgctggaggcgctttatctggccggtgagccgctggacgagccgacggccagttgggtaacggagacgctgggcgtaccggtcatcgacaattattggcagacggagtccggctggccgatcatggcgctggcccgcgcgctggacgacaggccgtcgcgtctgggaagtcccggcgtgccgatgtacggttataacgtccagctactcaatgaagtcaccggcgaaccttgcggcataaatgaaaaggggatgctggtgatcgaagggccgctgccgccgggctgtattcagactatttggggcgacgatgcgcgttttgtgaagacttactggtcgctgtttaaccgtcaggtttatgccactttcgactggggaatccgcgacgccgaggggtattactttattctgggccgtaccgatgatgtgattaatattgcgggtcatcggctggggacgcgagaaatagaagaaagtatctccagctacccgaacgtagcggaagtggcggtagtggggataaaagacgctctgaaagggcaggtagcggtggcgtttgtcattccgaagcagagcgatacgctggcggatcgcgaggcggcgcgcgacgaggaaaacgcgattatggcgctggtggacaaccagatcggtcactttggtcgtccggcgcatgtctggtttgtttcgcagctccccaaaacgcgttccggaaagatgcttcgccgcacgatccaggcgatctgcgaaggccgcgatccgggcgatctgacaaccattgacgatcccgcgtcgttgcagcaaattcgccaggcgatcgaagaatagccgtaagccggataagccgcgttcggcaacgggttagactcagcgactgaatagtggggtgtaaagtcgggaaagggcggcagcgcgccgccctgtaacagaattaacgcagaatatttttctcagccagatccagtgcgaagtagctgaaaatcaaatcggcgccggcgcgtttaatcgagcccagactttccagcacgaccttttcttcatcgatggcgccagccatagcagcaaatttaatcatggcgtattcaccgctcacctggtaagcgccaagcggcaactctgtgcgttcgcggatttcacgcagcacgtccagatacgcgccggccggtttcaccatcaagcaatccgcgccctgggcttcgtcgagcagtgattcgcgaatcgcttcacggcggttcatcggattcatttgatacgtcttgcggtcgccttttaacgcggtacccgctgcttcacggaaagggccgtagaaagaagaggcgaacttggtggagtaggacattattgccgtatcggtaaaaccggcggcatccagcgcctggcggatagcctggacttgtccatccatggccgcggagggcgcaataaaatctgctccagccgccgccgcgataacggcctgcttgccgaggttggccagcgtcgcatcgttatccacaccgtgttcgcacaacacgccgcagtggccgtgcgaggtgtattcgcagaagcaggtgtcggacatgacgatcatctccggcacggtttgcttacagatgcgggacattcttgccaccagaccgtcttctttccaggtatcgctgccggtgtcatcagtatggtgagaaatgccgaaggtcataacggaacgaatgccagcatttgcgatacgttcaatctctcgcgccagctgcttttccgggatacgcattacgccgggcatggcatcaatagctttgtaatcgtcgagttcttcttcaacaaagatcggcaacaccaggtcgttcaggctaagtgttgtctcttcaaacatagcgcgcagcgcagcggatttgcgcaggcggcgagggcgatggataaggtctgtcatggtctgcctgatgtttgtggaatcgaaggcccagtatacctgaatctgcaggcagatgttttacgaaaacggtccttaacgtagcaggcgcagccccggcggcggcggaacatggcgcttcttttatataccgaagattaatacctcaggcactatatcattttaaataagaattagttttacgttgtttttagttttatttcatcgtcatttaagtaaatgtgggttttaacattattcatgtttattttgtttttctttaatctatatttatcttatatgtattttgtttttttattttcttgtaaggtcatgaaaaagaatgcttttcaattataaaacttccttttattacgtctttttaattcatgtccgaatccggactgaggataaagaataattgaaccttttagcaatgacgccgcataatccttcttgctaaacatctgtatgtttttatgcattgataattgatggatcaactatattacgtccctgaggagggatgacaaatgcactcctggaaaaagaaacttgtagtctcacaattagcattggcttgcactctggcaatcacttctcaggcgaatgctactacttacgatacctggacttattacgacaatcctaccaccgcgcttgattggaataatatggatgccgcaggcactgttgatggtaactatgtaaactatagcggtttcgtttactacaacaatgccaatggtgatttcgatcagacgttcaacggtgacactgttaacggtacgatttctacctattatctgaaccatgattataatgacgcaaccagtaatgagctgaatattagtaattcagttattcatggctcgattacttccatgctgccgattggttattacgatcgttttgatacgttggatcacgatgggtattctgaatattatcggttcaacaacggtactgatactgttgacggaaactggtatgacggtgatgtgttcacgctgaacatcgctaattccaccattgatgatgattatgaagcgttttacttcactgattcctataaggatggtgatgtaactaagtacacaaatgaaacattcgatgtcagcgaaggcgtggcggtgaatcttgatgtagaaagcaacatcaatatttccaacaattcccgtgttgcaggtattgccttgtctcagggaaatacttacaacaacacttacacgacggaatcccataactgggataacaatattaatgtatttgactctactgtaacttccggttcagattatatcctggatagtgcttatactactgacactggtacttttggcacaggtcactttggcaattccgatgagccgagcgattatactggtgctggcgacgttgcattatctttcactgatgacaatggtgcttcagactatgcaatgaagaacaatgtgtacttcagtaattctacgctgatgggtgatgtcaaatttaccagtaactggaacgccaatttcgatgctgatggtgatgatactaacggtgatggtgttcctgataccaaccatggctgggctgatgacggcctcaacgtcgacgaactgaaccttacacttgataatggcagtaagtgggttggtcaggcgacttatactgttgatacaacgtcccgtatgtatgatgttgaaacgaacagccttactccaggcgcaacattggaagataatgcctggaatcgtatcgttggtaatgaagttttccagagcggcgtgtttaacgtgacgctgaacaatggttctgaatgggacaccgttggggactcgactgttgatacgctggctgtaaacaatggttctcaggttaatgtttctaattctgatttaacatcagacaccattgatttgactaatggttcttcactgaacattggtgaaggtggttatgttgacaccgatcacctgacaattgactcctatagtactgttggtttgaccgaatctactggctggagtacttactcaaacctgtatgctaataccatcaccgtaactaacggtggtgtgttggatgtgaatgttggtcagtttgataccgaagtattcagcactgataaactggaactgaccagcggcaatactgctgatcacaacggtaatgttgtttctggtgtgttcaatatccatagcagcgattatgttctgaacgctgacctggtgaacgaccgtacctgggataccactcaggctaactatggttacggtactatcgcaatgaactctgacggtcacctgaccatcaacggtaatggcgatatcaacaacggcgacgaactggataacagctctgttgacaacgttgtagcggctaccggtaactataaagttcgcatcgacaacgctactggtgccggttctgttgcggattacaaaggcaacgagctgatttatgtcaatgacgtaaacaccgacgcaaccttctctgcagcaaacaaagctgacctgggtgcttacacctatcaggctaagcaggaaggcaacactgtcgtgctggaacagatggaactgaccgactacgctaacatggcgctgagcattccttctgcgaacaccaatatctggaacctggaacaagacaccgttggtactcgtctgaccaacgctcgtcatggcctggcggataacggcggcgcatgggtaagctacttcggcggtaacttcaacggcgacaacggcaccattaactacgatcaggatgttaatggcatcatggtcggtgttgataccaaagttgacggtaacaacgctaagtggatcgttggtgcggcagcaggtttcgcgaaaggcgatctgagcgatcgtaccggtcaggtggatcaggacagccagtctgcctacatctactcttccgctcgtttcgcaaacaacatctttgttgacggtaacttgagctactctcacttcaacaacgatttgtctgctaacatgagcgacggtacttacgttgacggcaacacatcttctgacgcctggggcttcggcttgaaactgggttatgatctgaagctgggtgatgcaggctacgtaacgccttacggcagcgtatccggtctgttccagtctggcgacgactaccagctgagcaatgacatgaaagttgacggtcagtcttacgacagcatgcgttatgaactcggtgtagatgcaggttataccttcacttacagcgaagatcaggcgctgaccccgtacttcaaactggcttacgtttacgacgactccaacaacgatgctgacgtaaacggcgactctatcgacaacggcgtagaaggttctgcggtacgtgttggtctgggtactcagttcagcttcacgaagaacttcagcgcctacaccgatgctaactacctcggcggcggtgatgttgatcaagactggtctgcaaacgttggtgttaaatatacctggtaatcattttctctcaggagaaataaaggtaatttaaactgaaaaatgcccgtcaaggacttgacgggcattattgcaaggaatgcatatgttatctttaagcaagccactacaggaattctacagactcgataaatgcctttctaagcatggtacgcgtttcgagtttgttaacgataaagagattatctgttcacctgatgaaagtaatacccatacctttgttattttagagggggttgtttcgttagttcggggtgataaagttcttattggtattgtgcaggccccttttatttttggcttagccgatggcgtggcgaaaaaagaggcacaatataaattaattgcggagagcggttgcatcggttatcgcctctcatcatcacaaactctcgccatcattgagcagaaccaactgtggcgtgaagccttctgttggatagtatggaaaagtcaggtactggaacttcgtgacaagcagctcattggtaataattcttacgaccaaattcgtgcgacgttaatgacaatgattgagtgggatgaagaacttcgctcacgtattggtgttatgaattatattcatcaacgaacgcgcgtatcgcgatcggtggtggcggaagttctcgcggccctgcgtaagggtaattacattgaaatgaataaaggcaaactgatcagtattaaccgtttgccctccgaatattaacaaaaatgttgcgcctcgtctgatatagcgcgaggcgcgacgactcaggatgcaggaatagcaatcggtttattgccgcttagctcagtaaccaaatcgttaatcccgtcgctcatattggtaaaacgagtgaggggggaacgggttaccaccacaaaagcgccaatattatattgcgggatcatcgccatataggtaataaaaccgccgccgcctcctgttttctggataatgccaggacgtccgtcttttggcgccatatagacccaacccagaccgagcgcgtcggctttacccggtacgtccatcccgatgattttctttaactgtatgcgctgataaatcaacgtttgcatacgatcggcctgttggctacggtgatagaaatctgacgacagatactgttgcatccagcgcatcatatctcctggcgtagaatagaccccaccgctgccaatggctgccagcgtattattacaggggcttgcgcctttttctgccaccatcagacgcttacactgatcgggagaaggggtaaacgtggtgtctttcattcccagcgggcgggtaatcttttcttcaaacagttgcgtataaggtttgccggaggcggtcgccagcgcgtcggctaacaggtcgaacgccagattggaataggccgcctgtgaaccgggcgcgacttttaacgttgctgtggagagccagttccagcgttgttcgcgggttggccagacaaataccggacgatgcgccgcgccgccgggctgttctcgcggaagcgcgctggtgtgggtcgctaagttgaccaacgtaatcggcgtgccttgatacgtcgggacacgcgcgccgggaggcgcatatttgctgagaggatcgtttaattttaccgttccctgatcgagcaattttaccaacatttcactggtcatgagcttggtgagagaagcgatacgaatgaccgaatcaagctgtggacgaacattattgcccggtctggtgtcaccgaaactacgaaacacgcgttgattgccgtcgatcaccaccagcgccatgcccgtggcgccgctaccataaaagatatgctcggcataacgatcaacgatatcagaggcaaaaaccggatcggcaatcggctgagccgcctggacagaagtaagtgatgccgcaaacagcatggcagtaaaaagcagactacgtttcaacggtgatgtccataagtgaaataacggtggttatgcgtatttatactacccggcggcacattgcaaaacgttaaagagaaaaaagtgggtgaaaaaacgtaacggcgggttttcgtgatggagaatgtttacttttgtgatagagcgcttgtgataacctgatagcgtcagcgtgcctgctgtgtatgaaactcgtcgaaacaattctgttgagcagaaatgcgaactaagcgtcacaacgtaggtcacaatgcctggtttagccctttcatttgcgtgggcatggcgtgctattgccgccgtcacagcagccgtaataaagataagaagttagcaggagagcatgatgtttaaatcttttttcccaaagccagggccgtttttcatgtcggcgtttgtttgggcgctgatcgccgtcattttctggcaggcgggaggaggagattgggtggcgcgacttgtaggggcatccgatgaagtgcctatcagcgcagcgcgcttctggtcgctggactatctgattttttatgcttattacctgatttgcgtgggattatttgcaacgttctggttcatctatagcccgcaccgctggcagtactggtcgatacttggcacctcgctcattatttttgtcacctggtttttggtggaggttggcgtcgcggttaacgcctggtacgcgccgttctatgatttgattcaaacggcgctcagctcgccgcacaaggtcactcttggtcaattttatcatgaagtgggggtgtttctcggtattgcgcttatcgccgtggtgatcggtgtgctgaacaacttctttgtcagccactatgtatttcgctggcgtaccgcaatgaatgagcactatatggcgcactggcagtacctacgccatatcgaaggggccgcccagcgtgtgcaggaagataccatgcgttttgcctctacactggagaatatgggcgtgagttttatcaatgccatcatgacgctcatcgcctttctgccggtgttagtcaccctgtcagcgcatgtgccgaatttacccatcgtagggcatatcccttacggcctggtcattgccgccatagtctggtcattaatggggacgggcctgctggcggtcgtcgggatcaaattgccagggctggaatttaaaaatcagcgagtggaagccgcttatcgtaaggagctggtctacggtgaagatgacgccagccgcgccacgccgcccaccgtccgtgaactgtttagcgcggtgcgccataactactttcgtctctactttcactatatgtatttcaacatcgcgcgcattctctatttgcaggtcgataacgttttcggtttgttcctgctgtttccttccattgttgccggtacgattacgctggggctgatgacgcaaatcaccaacgtgtttggccaggtgcgcggttcgttccagtatttgattaactcctggacgacgctggtggagctgatgtctatttataaacgtttacgtagctttgaacgccagttggatggtcagccagttcaggaagtgacccactcttttagctaacagaaggaaacgttatgtcggcggcgtcccgtctttatcctctgccttttctggcggttgccatattggctggctgtagtagtcaatccgggcagccggtgagcaagggcgagaagcctgtcgacgtggcaagcgtagtacgtcagaaaatgccagccagtgtcaaagacagagaggcctgggcgaaagatatcgcgacaacgtttaagagccaggggctggcgccgacggtagaaaatatctgttcggtgctggctgtcgcccagcaggagtccggttatcaggcggatcctgtcgtgccggggctaagtaaaatcgcctggcaggagattgatcgccgcgctgaacgactacacatcccgctgtttctggtgcacaccgcgctgaaaattaactcccccaacggcaagagctatagcgaacgcctggacacggtaaaaaccgaaaaacagcttagcgctatttttgacgattttatcaatatggtccctatggggcagacgctatttggctcatataacccggtgcatacgggcggcccgatgcaggtcagcattgcctttgccgaacagcacgcgaaaggctatccgtggaagatgacgggtacggtacgtcaggaggtctttacgcgccgtggcgggttgtggtttggaacctaccatttgctgaattacccggcgaactacagcgcgcctgttttccgcttcgccgacttcaacgcgggatggtacgccagccgtaacgctgcgttccagaatgccgtcagtaaagccagtggggtaaaactggcgctggatggcgatctgattcgttataacagcaaggaaccgggcaaaacagagttagcggtacgcaaactggcagggcagttgggaatgagtgagcgtgaaattcgcagccaactggagaaaggcgatagcctggcgtttgaaaaaacggcgctctacaagaaagtctataaactggccgaggccaaaacgggcaagacgcttgcgcgggaaatgttgcccggtattcaactggaaagtccgaagatcacacgcaagctgacgaccgcctggtttgctaaacgagttgatgagcggcgggcgcggtgtatggggcgataaatttcgcgctgggatactttctccagcgcgctaaggtttattggtgacggtgacgccagcgtaaaaacgcggcgataacggcgaaaatgaggcagcccgtgaggaagggcaccaggccaaaaatcgtcccgacgcccagcccaatctctacccgcggtcgacctgtatcctgtacctgcatcagatgctcatagatgcccggcgcatgaaccagcaggtttaagagttgcgctccggcccagaagcaaaacagtacaaatatggcgtaagcaatatttccgggcgtagaggaggtttctcgatgcttcccgctgaacagcgattttgagagagtgaaatcagccataaagacctccaggatgatcggctacgatctggcgttatgccatcggcttactgtgaagtctgacaggtcattgtgtttgtcaatatcagaatcatggtaatttcacatacggaatgtatccatcgcgtaaatttttgttagttgtcacaaaacgatcacttttatcaaaatcaattaacatttaagaaattccgtatcccccacagactcgctcgccagaagtatgcaaaaatacgtttttgttactgttaatacgtcggagtcgttatgcgtttgcctgtaaaaattcgtcgtgactggcactactatgccttctctattggccttatctttattttgaatggcgtcgtaggattgctgggttttgaggctaaaggatggcaaacctatggcgttgggctggtaacatggattattagcttctggctggcggggttcattattcgccggcgcgaagaggatgaggtaaaagacgcccgataaacgttgcgctatcgggcgtgcgctattacatcgtggtttttaaggcgttattcgccgtatggcgttccagcgccagctcaatcagacggctgatcaaatcggtatagcccagtccgctcgcctgccagagttttggatacatactgatattggtaaaacctggcagcgtattgatctcgttaatcacgacctcattgtctgccgttaagaagacatcgacacgcgccatacccgcgcatcccagcgtctgataagcctggatcgcgatcgcgcggatcttgtcattcacctcggaagggatctgcgcaggcacgacaacttgtgcgccattatcatcaatatacttagtatcgtaggcgtaaaattcgctgttcagtacgatttcgccgcaggtactggcctgtgggttatcgttacctaatacggcgcattcgatctcgcgccctttgatcccttgctccaccaccactttatgatcgaattcgaaagccagcgcgaccgcctgctgatattgcgcttcgttagcgactttactgacgccgaccgaagagccctgattggcgggcttaacgaacagcggcagtcccagacgggattcaacctcggcaaaactaaacgcgtgacgattcgttcgggtgagtgtaataaacggggcgatattcagtccggcatcgcgtagcagtcgtttggcgacgtctttatccatgcaggctgcggagctcagcacgtctgaaccgacaaacggtaagtttgcgacgcgcagcatcccctgcaatgagccgtcttcgcccagcgtaccgtggacgataggaaaaataacatctaccgtcggtagcggctgcccgttctgagcgttaatcaattggtgttggtgtttgccaggcacctgggccagactgattgccgaaggacgtagcgcgatatgtgccggatcgtctgcattctgcaaataattttccgcatcgttaacatgccattgtcccgccttatctatccctaacagcaccacgtcgaagcgggttttatcgatcgcatcaacgatatttttcgctgattgcaaagacacttcatgttccgccgacttaccgccaaatactattcctacccgcaatttcgccatcttaaaaacccattccatcgaatgcaaagcgtatacattaccacgacaaaacgcgggtttcgcgggcttctgccataatgtttatgggatgtgagaacggaggccgcgtgagaggtaagggttttctgattattgtgctgttgggcggcattggcgggctgggatatcgttatcttccctcttattataatccttttgctccgctacaacttgccgatccgccaggctggatcactaccttcaaactacagcgcctgacgccgtcgcagtgccgggagcttttgacggcggccaatcaacagggattaatttcatcacaacctgttgcggatagcgctggtgaatgtcccttatcccatgttgtgcgcgtcagagattttggccaggtaaaactgagcagcagttttttagcctcctgcccgttggcgctgcgctccgcgctgtttgtcgaacagcaggcaaaacctttaacagaaacgtggatgaagcgccgcctgacccgtatcgaacatctgggcagctatgcctgccgtaatatttatcaccgcccggatgcgcgtcgcagtgaacatgccagcgcagaagcgctggatgtcagcgggtttcagctatcggatggccgaaaaatcactgtcctgcgcggctgggggcgtcaggagacggggccctggttacgcgctatgttaaacgccagttgccattattatggcaatgggctcgggcctgactataacgctgcgcatgctaaccattttcatcttggaatgcggggctacggcgtgtgtcgttaaagcataaacgtctgccttgcgcggctatataatgtgacatgtttcacaaaaatgatgaacggggagacaaaatagcaaagtgtgacgtatcgcacctctggaaccaccaggaaaaagagaacttgctaagctaacgcgtattttcagctacttaccgttacgagtcttatggaatcctggaaagttaatctaatttccgtttggtttggatgtttttttaccgggctggcaatcagccaaatcctgccattcttacccctttatatttcccagcttggcgtctcttcccatgaagcgttatcaatgtggtccgggttaacgtttagcatcacgtttcttatttccgccattgtgtcgccgatgtggggcagtctcgccgatcgtaaagggcgtaaactgatgctattgcgcgcgtcgctcgggatggcgatagctattctactgcaggcatttgcgacccatgtctggcaacttttcctgctgcgcggaatcatggggttaacgtcaggctatatccccaatgccatggcgctggtagcctctcaggtaccacgcgaacgtagcggctgggcgctcagtacgctttctaccgcgcagatcagcggcgttatcggcgggccgttaatgggcggctttgtcgcggatcatatcgggctgcgggcggtatttctgattaccgccatgctgttggtggtgagctttctggtcacgctatttttaattaaagaaggcgtgcgtccggtcatcaagaaaagcgaacgcctgagcggtaaagccgtttttgcgtcgttaccttatcctgcgctggtgatcagtttgttttttaccacgatggtcattcaactctgtaatggttccatcagtccaatcctggcgctgtttatcaaatcaatgatgccggacagtaataacatcgcctttcttagcgggttaattgcctcggtgcccggtatctctgcgcttatctccgcgcctcgcctgggaaaacttggcgacagaatcggcacggaaagaattctgatggccacgcttatctgcgcagtgctgcttttcttcgcgatgtcctgggtcaccacgccgttccagctggggctgttacgtttcttgttaggctttgccgatggcgcgatgttacccgccgtacaaacgttattggtgaaatactccagcgatcaaattaccggacgtatttttggctacaaccagtcatttatgtacctgggcaacgtggttgggccgttgatgggcgcgacggtatcggcgatggccggtttccgctgggtttttatcgctacggcggcgatcgtgttgatcaatatcgggcaactgaccctggcgttacgtcgtcggcgtaacgcgcaaaaagcgaaaggccaatagcggtgcatcgtaacggcgcttctgccgttacgatatggtttaaattaaaagatatattctttatccgtgaagtttttctatagatggcataaccttaaattatgatatagcgtgattattgttttttgatggtttattatcgtctcgttttcggtctgagaaacgtttcgctgcggcgacagtgataattatttgtgtaaagttcttcctgtatcataaaaatagtactttcagcctctaggcagtggttcttcatagtgataacgtcaccctggaactaataaggaaatatggtcatgaaaaatctcatagcagagttgttgcttaagctagcccaaaaagaagaagagtcgaaagaactggttgctcaggtagaagcgttagagattatcgtcacagcaatgttacgtaacatggcgcaaaacgagcaggagatgttgatacgtcaggtagagggggcacttgaaggcgtaaagccggatgccagcgttcctgatcacgatacggaattgctgcgccaatatgtaaaaaagttgctgagacacccccggcactaatcgtatttaaaacaacacagttgttataacgttacttttatgaaataacatagccgcttcgtttttattttcttctgggtaatacagagcaaaataaaaacgaagcggctatggtaataacagtgtaacgttatgcgctgttcttctgcatcctgccagtgtaactgtggataatcgaattgcacattagcctacggtttgtcaatcaataaaacatctattgctaacggtaagtaatacttttacagccgggtggtatttttgccagtaacagccagacttatataaagtccctgggatatttcccaaagggacaacgtgtaatgtgtacactgacaaaaggatggtgctatgaaaataacattactggtgactttactttttggcctagtctttttaaccgccgtcggcgcaaccgagaaaccgttaacgccgcaacagcagcgcatgacgacctgtaatcagcaggcgacagcgcaagcgttgaaaggcgatgcgcgtaaaacctaccttagcgactgcctgaaaaacagtcagtcagcccctggcgagaaaagcctgacgccgcaacagcagaaaatgcgtgaatgcaatgttcaggcgacggaacaatcactgaaaggcgatgaccgtagcaagtttatgagcgcctgcctgaaaaaagcggcgtagtgctatcgggtgagtcctgaaaaacactcacccgaaatttcatacttcctccatgcgctctgtttctataatttgggaaaattgtttctaaatgttcccaaaaataatgaatgatgaaaatttttaccgaaaagcggttgaacaggcggtagcgccgcctgaccctcctgatgatcgtcagcgctccgggttgcgcttcgcccggcgcatcaggctaccgcgtgcggtggggttaggggggatgtttttaccggtggccgccgtgttagtgacgcaacctgtctttggcggctggtggctattgctggtcggctggtcttttgtctggccgcatctggcatggcagtgggcggcgaaagcccttgatccgctacgccaggaaatttacaacctgaaagtggatgcgatcctctccggcatgtggatcgcgctgatgggcgtcaatatgttgcctgccgccgcgctgtttatgatgatgagcatgaatctgatgggcgctggcgggcggcggctattcactgtcggaatgggccttttgctggcgtcatgtctggtgacgttgcagcttgccgggctacccgtcgcgatgcgaagctcgtcgctggaagtcacgctctctttgcccgtcattatgttgtatccgcttctgttcgcctgggtaagttaccaaacggccattaaattagcggaacataagcgacgcttgcaggcgatgagctcgcgggatggcatgaccggcgtctataaccgacgccactgggaaattttattacgtaatgaattcgatcacagccgacgccaccatcgggaggcgacattgttgattatcgatatcgatcattttaagagcattaacgacacctggggacatgatgttggggatgaggctattatcgccctgacgcgtcaattacagataacgctacgcgggagtgatattatcgggcgctttggcggcgacgaatttgcggtgattatgtgcggaacgccggcagacagcgcgattaccgccatgtcgcgagtgcatgaacggctaaataccttacgcttgccgggcgcgccgcaggtcatgttacgtatcagcgtgggcgtggcgccgttaacgccacaaatcggtcattatcgggaatggctaaagtctgcggatatggcgctttacaaagcaaagaatgccggacgtaaccgcaccgaagtggcggcatgacgtccagccgggcttcaggatttactgagcgcctctgatttttccatacacttcgtcatcgcttctattaccgcagcgcggaagccacgttcttccagaacgcgtacggcttcaatcgtcgttccgccaggcgagcacaccatatctttcagttcgccgggatgctttccggtttcgagtaccattttcgccgaccccatgacggcctgcgcggcgaatttataagcctgagcgcgaggcataccgcccagaacggcagcgtccgccatcgcctcgataaacataaagacataggccggcgaagatccgctcacgccaaccaccggatggatcatcggctcagcaatcacttccgccccgccaaagcagcggaaaatattcagcacatcagccgtatcttccggtgtgaccagcgcgttgggcgtgacggaggtcattcctgcgttgaccagcgacggcgtattcggcatagcgcgaatgattttacggtcgtgtcccagcgcgcgcgcaagctgatcaagcgttacgcctgcggcgatagagaccaccagcgagtctttgttcaggctggaggagatttcactgagcactttcaccataatgcccggttttaccgcgccgaaaacgatatccgcgacctgagcgacctcctgcgcgctttgcgccgcattaatgccgtactgatcatgcagggcggcgactttatcgggggagggggtatagacccagatctggccgggaagtacctgaccgctggcaatcagtccgccaagaatagccttgcccatattaccgcagccaataaaaccgattttcttctccatctcgtcactccctatgtttgtgtgttatggggaatggttagcttaacgcggattgaaaacgggcagaaggagaaacagcactttgatgaaagacaaaagcgcgagacaataaaagattgtataccgtacgggagacattatgaccatctgggtggatgcggatgcgtgtccgaatgtcattaaagaaattttgtaccgcgccgccgagcggatgcagttgccgcttattctggttgccaatcaggccttgcgcgtgccgccttcgcgttttatccgcacgcttcgcgtggccgccgggtttgacgtggcggataacgaaatcgtgcgtcaatgcgaagcgggcgatctggtgattaccgcggatattccgctggcggctgaagtgctggaaaaaggcgctgcggctcttaatccccggggagaacgctatagcgacgccacgattcgcgaacgtctgacgatgcgtgactttatggacacgctacgcgccagcggcgtacaaacgggggggccaaacactctctcgccgcgcgatcgtcagcattttgccgccgagctggataagtggtggctggaaagccagcgtaaaaaataaatcatgtaatgaaaaatttacagtttattcatttctgattcttgctatagtactaatattgtgactttagtacctttgtgtaaattattatttacatttatgcgttgtactagttagatgatatgattataacattgctgatatcaaatcctgcgtatgcgcagttcctgggggaacgcctgctatgatgcaacctctttatcttgttggcccgcggggctgtgggaaaaccaccatcggtatggcgctggcgcaggcaaccggttttcggtttgcagataccgaccgctggctgcaatcgcacgtgcagatgagcgtcgctgatatcgttgaaaaagaaggctggggagggttccgcgcccgggaaaccgcggccctggaggcggtaagcgcgccttcgactgtcgtggcgacgggaggcggtattattctcacggagtataaccgacgttatatgcaccgtgttggcgtagtgatttatctgtgcgcgccggtatccacgctggttaaccggcttgaggctgaacctgaagcggatctgcgcccgaccctcaccggcaagccgttgagcgaagaggttcgggaagtgcttgagcagcgtgacgcgttgtatcgcgaaacggcgcattacattattgacgcgacgaaagcgccggcccaggtcgtttctgaaattattgcggcgctgccgccgtcgacgcaacggttacagggagatgtctatacttaacgctcacccagaataaaggaaacgctatgccaaccagaccaccttatccgcgggaagcttatatcgtcaccattgaaaaaggcacgccgggccagacggtgacgtggtatcagctacgggctgaccatccgaaacctgattcgctcatcagcgagcatccgaccgcagaagaagcgatggatgcgaaaaatcgttacgaagatccggataaatcatagacgcatgaaccactcggaagggattctgagtacccctaaattgtatctccatcacattcttgaaacatttatactggcaactaaaaccgtaaattaagcgataacaatacaatattggagttatttggaatctttacacaatacgttgctcatctgctgctacgctttctgagatttgtagggcaggtagcgcggtgagcgtgtgaatatttgcccgggaattacgacgaagtaataaggtggaataaaaatgagtgcgtcgttggcaatcctcacaatcggcgttgtgccaatgagcgaagtgttaccgcttctgacggaatacatcgacgaacaacacatcacccatcatagcctgctgggaaaaatgagccgggaagacgttatggcggattacgctgtagagcctggcgacgatccgcttttgacgttgctgaatgataaccagatagcccatgtttcccgccagaaagtggagcgagatttacagagcgttgtcgaggtgctggataatcagggttacgatgtcattatactgatgagcaccgcggcgattaaaagtatggcagcccgtaattctattttgcttgaaccgctgcgtattattccaccgcttgtcgcctctattgtggatggacatcaggtgggcgtgattgtgcctgttgcagaacttctggcggcccaggagaaaaaatggcaggtattgcaaatgccgccggtgtattcgctggcgaatccggttcacggttctgagcaacagttaattgatgccggacaggcgctactggatcaaggcgcggacgtcattatgctggattgtctgggttttcatcagcgtcatcgggatattttacagcaggcgctggatgtgccggttttactctctaacgttttgattgcgcggttagcttcagaactgcttgtctaattttacgtgacaggccgaacgtcaggactctatattgggtgttaatttaataatgagacggggcctgattatgctacaaagcaatgaatacttttccgggaaagttaagtctattggatttaccagcagtagcaccggccgggccagcgttggtgtgatggcggaaggggagtatacatttggcaccgccgaacccgaagagatgacggttgtgagcggcgcgttgaaggtactgttgccgggaactgtcgaatggaaagtgtatacagccggtgaggtgtttaacgtgcctggccacagcgagtttcatctccaggttgctgagcccgcctcgtatctgtgccgctatttgtaacggtgagtcccctctccggcggagaggggccctctggttagcgctgcgcttcgccgcctaatccttccaccaggctttgaatcagcgccgccagctcgccggtcatcaggataaagtccgcgtcaaaacgttgggcaaaatcttcccggtcgatatcttcgttctggtcgcgcagctcatcgcagaatttcagacgcttaatggagccgtcatcgcacatgacgaattgaatgcgctgctgccagtcgagcgccagcttcgtgaccactttacccgcttcaatatgaacggcgatctcgtcgctgaccagatcctgctttttcgcgcggatcacgccgccatcttccagcatcgctttcaattcggcttcgtccagcaactggaaaccctgagcgaccgtaccggagcgcacccactcggtgagcgtcagctcaatcggattttccagcgccagcgggacgaccggcagcgagccaagacttttacgcagtagcgccaaagtatcttccgcttttttcgcgctggcgcagtcaaccataatcaggccgttaacggtatcaatccacatcattgtctgactgaagcggctaaacgcgcgcggcagcaacgaatgcaacacttcatccttcagggaatctttttccgtcttcttcagcttgcgtccctgatcggcttccagtttctggattttcgcctccagtgcctgtttgatcactggcgatggcaggattttctcttctttgcgcgcgcaaataataatttggccattggcggtgtgcgttaacgcatcgctgtgagagcccatcggcggaacccagcccattttggccatatcctggctaccgcatggggtaaacgtcattgaggcgagctgtttctccatctcttcggcgcgtaatgtaatatcgcggctaagacggtaaaccattaaatttttgaaccacagcatgataatttccacggccttgtcgttaaatccaggcggtatagtaacgaattgtcggcaggcttgcattgccaatcagaacggtgaattctaccctgttgatattcccaaaaaatgaggagcggtatgtgcgtattggtatcgatttaggcggcacaaaaacggaagtcattgcgcttgatgatgcaggagagcagcggtttcgccatcgtctgcctacgccgcgggaggattatcagcaaacgatagaaaccatcgctacgctggtcgacatggcggaacaggcgaccggccagaccggtagcgtcggcattggcattcccggttctctctcgccttacaccggcgtggtgaaaaacgctaactctacgtggcttaacggccagccgttcgatagcgatgtgagccgtcgtctgaagcgtgaagtgcggttagccaacgatgccaattgcctggcggtatcagaggcggtggatggcgcggcggcgggggcgcaaacggtatttgcggtgattatcggtaccgggtgtggcgcgggcgtagcgctaaatggccgggcgcacatcggcggcaacggtacggcaggtgaatggggccacaatccgttgccgtggatggatgacgatgagttgcgttaccgcgaagaaattccctgttattgcggtaaacaaggctgtatcgaaacctttatttccggtacgggatttgccacggattaccagcgtttgagcggtaacgcgctaaaaggcgatgagattattcgtctggtcgacgcgcaggacgccgtggcggaactggcgttaagccgttatgagctgcggctggcgaaagcattatctcatgtcgtgaatattctggatccggatgtcattgtgctgggcggcggtatgagcaatgttgagcgcctgtacaagacggttccgtcgctgatgaaatcgtttgtttttggcggcgagtgcgagacgccggtacgtaaggcgcggcatggcgattcgagcggcgtgcgcggcgcggcctggctgtggccgctggcgtaacgttgttagccggatggcgcgtcatccggcaaccggcgtgaccgatggctgcttgtgttttagacgtccgtataccagcaacgacgacatggcggaaaacgagagcagggcggcgggaagcgccacatagtggtacgcaaaacctagtgtcagcatcagcccgccgcaccaggcgccaatcgcgctaccgagattaaacgcgatttgccctcccgccgcgcccagcagttcgccgcctttggcgttttgcagtagcaggatttgcagcggcgcagagagcgcaaacagaccagcgcagcagataaacgcgaaagtcagcgatgtcgttttgtatccgctgaagaaaaagagcgccatgagagaaagcacgataacgaggtcagtcactaccgcgatgcgcagcggagtatatctgccggagagtttgccgcttaacagattgcctaacaccatccccagcccgaccagcatcataataaacgtcatgctcgtctccgaaaaaccggagatgtacatcataaatggcttgatatagctgaaccaggcaaaaacgcccgcattgccgaacatcgtggcggcgaaaatgagccacggcgaggggctacgcaagaagtgaaactgctcgcgcaggctgccttgggctttgtcgcgaatatccggcacccagaagaaaattgcggtgagcacggcgatgttgaaaaccgcgatcaataaaaaggtgtagcgccagctaaattcctggctcaggtaagtgccgaacggaatgcccaccagattcgccaccgtcatccctgaaaccatacccgcgacggcggcggtgaccttcccggggcggataatctttgacaagacaatggcgccgacgccaaaaaaggcaccgtgcggaaagccggaaaccagtctgccgacggcgagcatcagatatgacgaggaaaaggtaaatatggcattgcccatcacgcacaacatgaccagaaacaacagtatatgtttaagcgaaaagcggctggaaaagagcgccataacaggcgcgcccagcacgacgccgaaggcgtaaaacgagatcatatgcccggcggcgggaattgttatcccgacatcgcgtgccagctccgtcagcacgcccataatgccaaactcggccatccccagtccgaacgtacccagcgccaaagaaaaaataacttttttcataccacctgccgaaaataaaggcgcatgttgcgcgctgtggctgtgaattgtcacagccaatcaacgtatagcttgcggataagcgcgaggtaataccattccttatccgtctttgtgtattcattattatgctatgtcatgacggtatgctgtgcgcaggatgacactcgtgttactccacggcaaacgctttgtccagtttgctataaccaagcccattgatttttttcacttttatctgcacagggatacgttctttcatggcttccacgtgactaatcacaccgatggtcttcccgctggcattcagcgcatcgagcgcatccagcgcggcgtccagcgtttcgctatcaagcgtgccgaagccttcgtcgaggaacaaagaatcaatgcgcgttttatggctgaccaaatctgataacgccagcgccagcgccaggctgaccaggaaactttcgccgcctgataacgttcgcgtatcgcgcacggcgtcggcctgccaggtatcgacaacctccagttccagcgcgtcgctggctttgcgctgcaataaatagcggccatgcaggcgggtgagctgatgattcgccagccagaccagattatccagcgtcagtccctgggcgaatttgcggaacttatcaccttctttagagccgatcagcgcattgagatagccccagtcttccacttgctgagaggcttgcttcatttccgtcatcagcgcgcgttggcgctgccgattatctgcatcctgtttaatttgctggcggatttccccctggcgtgtcgtgttctcgcgcagttgttgcgccaactgcgtcagccgctgcgcgagctgctccgccgtacacgttgggtccagacctgcgggcggctgttgctgatggtcagccagcgcctgcgcggactgcgcgcttaacgccttcgcttgttgtagctgactttccagcgtttgttgttgtttttccagacgggtcacggtctcttcatccagcaacgccgccaggaacgttgcctggctgtcaaacgggctattttttaacgccgcatcaaagtgcgctatcgcctcggcggcgcgctgctgctcctgcgtcgtttgttcctgcagggtttgcaactggctttgtaatgacacgcactcatcatgcgcctgccgccagttatccagcggcacgtcgtcgtcggaatccgcggtatccgtttgcggtagcgtctccagcaacggggcaagcctgtcgatctgcatttgcaaatccgcgaactctgtctgacgctgttgccatattttcgcttcgtcggcgcgctcattcagccacgaagcctcgtcttctggcgcaggaagggaaagcgtatactgcgccaaatctgccgtcagcgacgcctgacgctgcgcaatctgcgcggtaaagcgcgctacctgttcagtatgcgccgcgatttgcgtttgtagagcatgacgctggctgagctgatccaactgttgctcatgctcttccgcggcggtcagccagcccgcgaggtcttcttgcggctggagctgaacgcccagcgtagcgcacagcgtttgccattcctcagtaagcgcttgctcctcctgcaacaacgactgcgcctcgctttcatcccgctgtaattgttgcgttaaggcatctaactgtcctcgcagcgccgcgccttcttccgccagcgttttgacctctttttccagcgcgtcgcggcgggtttgattcgcgctcagttccagcgcctgataggcggcgatggcggggtgcgtcgtcgagccgcaaagcggacacggctggccggactgtaagtgcgcccgctggctttccagatctttgatgcgcgcctcctgctcgcaaatagtgcgaacgtccgcaagctcctgcgctttagtcttataactcaaacgcttatccgccagacgttgggtgtattgcgcctgctcctgatgatgacgcgcgatagctgcctgtagctgcgcctgacgcttttgtttcgggagaatttgcccctgaagcgcggcgagacgatggcgtagcggacgctgccgggtatgcaatgctctggcttccgccagcgcctgtggcgtgaggtcgagcgtgagcggcggtagcgcatcacgctgacgcgtatcgctcagcaactgctgttgccattggctcagttgcgcccgatcgtgggattgttgtgttaataatgctcgccaccccgccagttcgctgcgccagacgcggatgccgtcgtgttccgccagccatgtcttcaaccgctgccctgtggcgttcagttgcgtgaattgtcgatgcgcgcaggcgcggatacgctggcgcaggcgatacgcgctttgtaagcgagcattcacttcatcactgtgctggcgaacacgctcaacggcgcgggtttgttcctgaatgcgctcccagtgcgggcgcaactggcgagcaggttgcgccagtgtcaacgccgcgagctgcggctgcgctttttctcgcgcctcttgcgccgcgtacagcgcctgctgccgggcgtgtaattcagtgtggagctcgttttttcgggtcagccagtgaaggtgctgctgctgtccctgctggtcggccagcaggcgtttctcttcgtcagtaagcgcctgcaaactggcttccagttgctgtaactgttcgtccgccaatagggcgacgccgctggcctgcgcttgtaacttttccagttcgagacgggctgatttatgtttttcaaatacctgtgcggagatctgcccgtaaatctcagtgccggtgagctcctccagaagctctgcgcgctctttcgctttggcgttaagaaaggcggcgaactgcccctgtgataacaacatcgaacgggtgaagcgcccgtagtccagcccggtcaacgtggcgatcatctccagtttatcctttaccttatcggcaaagatctttccgtctgaacaccgtgccagctctacgcgtggggcctggagattgccgtcaggctgatttcgggctcggttctggctccagaacgcgcgccaggcttcgccttttacctcaaactccacttcggccagacattccgctgtatcgcgcgtcatcaaatcgttttgcgattgcgataccgtattcaggcgcggcgtttcgtggtacagcgccaggcagatggcgtcaagcaaggtggtttttcccgcgccggtcgggccggtaatggcgaataacccgttactggcaaacggttcggcggtaaagtcgaccttccattctcctttcagcgagttcaggtttttcagacgcaaactgagaattttcatgcctcatgctcctcattcaacgcgtagagcgtgctggaaaagagctgattcaggcgctcgcgctgcgggggatctaacgcttccagcgccagacgccgcgcaaaaacctcctccacgctaagctcgcttaatgtttcccgccgctcgttcgccagcgagcgctcgcgctgttcgcggctacggcgcaccagtaatacctctacggggagtgactccgttaatgtctgtattctgcgttggatatcgtgcagataatcatcggtggtgatttcaatatccagccagacggggggcgattgctcaacgccgcgccactgctcaagctgttcggtaattgacgccaggtcgccttttaaaaccgccagcggttgagtcacggggacagccagactttcggtactttgccatttcccctgctcgaaggtcaccagatgcacgcatttgcttttgccgcactcatcaaagctgagggcgatgggtgagccgcaatagcggatatgctccgtgccgccgacacattgcgcgcggtgaatgtgtcccaatgcgatataatccgcgggggggaaatgctgcgccggaaaggcatccagcgtaccgatataaatgtcgcgaaccgcatcgcttttgctggcgccgacggtggttaaatgtcccgtcgcgataaccggcagctttcgttcgccgcgtagctggcacgcttcctgatactgctgttgataataatcggcaatcgcatgaagaagttgctgctgtttctcgctgccggataatcccgcctgactggtaataatgtcgcgcgggcgcaaaaagggaatggggcacagtacggcgcccggagacccgtcgcgacgatgaagtagccgcggcgcatagcccgcgctggcgatcacggttgtattgagaaacgccagaatgtcgcgcgattcgtttagcgtggcgacggaatcatgattaccggccagcaccaccagatgacagcccgtttgctgtaaattaacgacgaaacggttataaagttctcgggcatagcttggaggcgaaccggtatcaaaaatatcgccagcgacaataatggcatccacctgatgggcctgcgcggtctccagcagccagtccagaaaagcctgatgctccgcggcgcggcttttactgtagaaattttgtcccagatgccagtcagaggtgtggaggatgcgcataattgttccatgcaaaaaaagcgtgaacgggattatacacgtcatcccttccatttttgggcgcaatttaccgccggtacacggtaatgcatggtttcaccggtgtcataaatcatcaacatgctgtcaatgccgcctttttttttcataaatctgtcataaatctgacgcataatggcgcggcattgataactaacgactaacagggcaaattatggcgagacgtattctggtcgtagaagatgaggcgccgatccgtgaaatggtgtgcttcgtgctcgaacaaaatggctttcagcccgtagaagccgaagattatgacagtgcggtgaataaacttaatgaaccctggccggatctcatccttcttgactggatgttgcccggcgggtcagggttacagtttattaaacatctcaaacgtgaagccatgacccgggatattcctgtggttatgctgaccgcaagaggtgaggaagaagatcgtgtgcgcgggctggaaaccggcgctgacgattacattaccaagccgttttcccccaaggagttggtggcgcgcattaaagccgttatgcggcgcatctcgccgatggcggtcgaagaggtgatcgagatgcagggactgagccttgatcccggctctcaccgcgtgatgaccggcgacagcccgctggatatggggccgaccgaatttaaattactccatttctttatgacgcacccggaacgggtttacagtcgcgagcagctactcaatcatgtctggggcaccaatgtgtacgttgaagaccggacggtcgacgtgcatattcgccgtttgcgtaaggcgctggagcacagcggccacgaccggatggtgcaaacggtacgcgggacagggtatcgtttttcgacccgcttttaatgccttttccgccagtagaacacaggtttctggcggagaaggctttccattcttgagggagtatgacgcgtgctggaacggctgtcatggaaaaggctggtgctggagctggtgctctgttgcatccccgcgcttatccttagcgctttttttggttatctgccgtggtttttactggcggcggtgacgggactgcttgtctggcatttctggaatttgttacgcctctcctggtggctttgggtcgacagaagtatgacgccgccgccgggacggggaagttgggaaccgctgttatacggtttacaccagatgcagttgcgaaataagaagcgtcgccgcgagctggggaacctgattaaacgttttcgcagtggcgcggagtcgctgcctgatgccgtggtactgaccacagaagagggcggcattttttggtgtaacggtttggcgcaacagatactggggctacgctggccggatgacaacgggcagaatattctcaatctactgcgttatccggagtttacccagtatttaaaaacgcgtgatttcacccgtccgcttcatttggtgctcaataccgggcggcacctggagatccgcgtcatgccttataccgataaacaactcctgatggtggcgcgcgatgtgacgcaaatgcatcagcttgaaggcgccagacgtaactttttcgccaacgttagccatgagttgcgtacgcccttgacggtattgcaaggctatctggaaatgatgcaggaacaggcgctggaaggggcgacgcgagagaaagcgctgcatacgatgcgcgagcaaacgtatcgtatggaagggctggtaaaacaactgcttacgctgtctaaaattgaggcggccccggcgctgttattaaatgaaaaagtggatgtaccgatgatgctgcgggtcgtggagcgtgaagcgcagacgctcagccagcagaaacatacctttacgtttgaggtcgacgatagtcttagcgttctgggcaacgaagagcagctacgtagcgcgatctcaaacctggtgtataacgcggtaaaccatacgccggcgggaacgcatattacggtgagctggcgacgtgtcgcgcatggcgctgagttttgcattcaagataacggtccggggattgctgccgagcatattcctcgtctgaccgaacgcttctaccgtgtcgataaagcgcgttcgcggcaaacgggcggcagcggcctgggattggcgattgtgaaacatgcgttgaatcaccatgaaagccgccttgaaatcgacagttcgcctggcaaaggaacgcgatttagctttgtgctgccggaacgtttaattgccaaaaatagcgattaattgcctttcgtaagtataactttccataagccagcggatgctggcttattttctttgcagttaagacgggctcgttgaaacattcaacgtttggtggttttttgttcgcatgattagccataactttttcatgagaatggtgttttattctggttgtaaatttcatatcgctatattcatctggtttttagatcccaccttgctttaaaacgttataagcgtttaaattgcgcttcaggtgctgtcattacgactgcatttgcgcggtaaatcgaaaaacaattcttcgccgcatcggtccgggagcttttcccgctgaaattgataaaaaacgccgctttataatcctccgggaaaggcaaaaattttaatgtttacaacatcaccatccacaggcagtaagactttatgacccatcagttaaaatcgcgcgatatcatcgccctgggctttatgacatttgcgctgttcgttggcgcaggcaatattatctttcctcctatggtcggtttgcaggcgggtgaacacgtctggacagccgctattggctttctgattaccgccgtagggctaccggttcttactgttgtggcgctggcgaaagtcggcggcggcgtagacagcctcagtacgccgattggtaaagtggcgggactcctgctggcgaccgtttgctatctggccgtcgggccgttatttgcgacgccgcgtaccgcgacggtgtcgtttgaggtcggtatcgctccgttgactggcgattctgcaatgccgttgctgatttacagcgtggtctatttcgctatcgttattctggtttccctctatccgggtaagctgctggatacggtagggaatttcctggcgccgttgaaaattattgcgctggtcatcctgtccgtcgcggctatcgtttggcctgccggtccaatcagcaacgccctggacgcttatcagaatgcggccttttctaacggatttgtgaacggctatctgacgatggatacgctgggcgcgatggtgtttggtatcgttattgtgaacgcggcgcgttctcgcggcgtgaccgaagcgcgcctgttgacgcgttacacggtctgggccggcctgatggcgggcgtggggctgacgctgctttaccttgccttgttccgcttaggttctgacagcgcgacgctggtcgatcagtcagcgaacggcgcggcgattcttcatgcctacgttcagcatacctttggcggcgcgggaagcttcctgctggcggcgctgatctttatcgcgtgtctggtgacggcggtggggctgacctgcgcctgcgctgagtttttcgcgcagtatattccgctgtcttaccgcacgctggtctttattctcggcggcttctctatggtggtgtcaaacctcggactgagccatctgattcaaatctccattccggtgctgacggctatctatccgccgtgtatcgcactggttgtattaagttttacccgctcatggtggcataattccacccgtatcatcgcgccggccatgtttatcagtctgctttttggtatccttgacggcatcaaagcatctgccttcggcgatatgctgccagcctggagtcagcgtttgccgctggcggaacagggactggcttggttgatgccaacggtggtgatggtgatcctggcgattatctgggatcgcgcggcgggtcggcaggtgacctccagcgctcactaaaatcgctgacatatgtgtacaccacggggcttaacgccccgtggttttttattgtgttgataggtcagaaattgatggaaagcaataataagctaaagcgtgggctgagcacccggcacattcgctttatggcattaggttcggcaatcggcaccggcctgttttacggctcggcggacgccatcaaaatggcggggccgagcgtgctgttggcctatattattggcggggtcgcggcatatatcattatgcgcgcattgggggaaatgtccgttcacaaccctgccgccagctcattttcgcgctatgcgcaggaaaacctcggcccgcttgcgggctacattaccggctggacctactgttttgagatcctgatcgtcgccattgccgacgtgaccgcgttcggcatttacatgggagtctggttccccgccgtgccgcactggatttgggtacttagcgtggtgctgatcatttgcgccatcaacctgatgagcgtcaaggtgttcggcgagctggagttttggttctccttcttcaaagtcgccaccattattatcatgattgtcgcgggtatcggcatcattgtgtggggaattggcaacggcgggcagccgaccggcattcataacctgtggagcaacggcggcttcttcagcaatggctggttgggaatgatcatgtcgctgcaaatggtgatgttcgcttacggcgggattgagattatcggtatcaccgccggggaagcgaaagacccggagaaatccattccgcgcgccattaactcagtaccgatgcgtatcctggtattttatgtcggcacgctgttcgtcattatgtctatctatccgtggaatcaggtcggcacaaacggcagtccatttgtgctgacgttccagcatatggggattacctttgccgccagcattctgaactttgtggtattgaccgcctcgctttccgctatcaactccgatgtgtttggcgtaggccgtatgctgcatggtatggcggagcaggggagcgcgccgaaagtctttgctaaaacgtcacgccgtggtattccgtgggtcactgtgctggtgatgacgattgcgctgctgtttgcggtttacctgaactacatcatgccggaaaacgtcttcctggtgattgcttcgctggcgacgtttgcgacggtatgggtatggattatgatcctgctgtcgcaaatcgccttccgtcgtcgtttaccgccggaagaggtaaaagcgctgaaatttaaggtgccgggcggtgtcgtaacgacgatagcgggtctgattttcctggtcttcattattgcgcttatcggctaccatccggatacccgcatctcactgtatgtgggcttcgcctggatagttctgctgttgattggctggatatttaaacgccgtcgcgaccgtcaattggcgcaggcgtagtcgtttttctctgccttatccggtctgcaggcaacggtagaccggataagcggagccgcttctcctcctggagcctcctcccctaataaacccctggatgatgagttatcctttaaatctctgtggcaaggtggccccattttcagtagaggggatacgagatgttgaatgcctggcacttaccggttgccccatttgtgaagcaacataacgataaattaaccattacgctgtggctgagcggagaaaatccgccgtctcgcgtgacgttgcgctcagaattcgataatgaagaaatctcactggcgatgcgcaaacagcgccgccagccgcagccgggcgtgacggcgtggcgagcgacgctcaatatcgcgttagggcaaccccgtcgccgttacagctttaaattgctttggcatgaccgccagctttggtttacgccacagggatttagccgttttccgcctgcgcgtctggaacaatttgcggttgatgtgccggatagcggcccgcagtgggtcgccgatcaaattttttatcagatcttcccggatcgttttgcccgcagccagtctcgtgaagccgggcaggaccgggtgtactaccatcatgccgcaggtcaggagattgtgctgcgcgactgggacgatcctttaaccccccaggcgggcggttccaccttttacggcggctgtctgaatggcatttgtgagaagctgccgtatctgaaaaaactgggcgtcacagcgctatatctgaatccggtatttaccgcgccgagcgtccataagtacgatacggaagattatcgccatgtcgatccgcaatttggcggcgatcgggcgctgctacgcctgcggcgtaaaacccaggtgcagggcatgaggctggtgctggatggcgtgtttaatcatagcggcgactcgcatgtgtggtttgacaggcataaccgcagcactggcggcgcgtgccatcacccggactcgccgtggcgcgactggtactccttttcaccacaaggcgtggcgctggactggctgggttatccgagcctgccgaaactcgattatcaatcagaaacgctggtcgatgagatctatcgcggtgaggacagtatcgttcgtcactggctaaaggctccgtggaatatggacggctggcggctggatgtcgtacatatgctgggcgaggcgggcggggcgcgtcataatttgcagcacgtcgccggtattacccgggcggcaaaagaggcgcagcccgaagcctatattgtgggggaacatttcggcgatgcgcggcagtggctacaggccgatgcggaagatgccgccatgaattatcgcggcttcaccttcccgctatggggatttctcgccaatactgatatcgcttacgaaccacagcatattgatgcccggacctgtatcgcgtggatggataactaccgcgccgggctgtcacatcagcaacaactgcgcatgtttaatcaactcgacagccatgatactgcgcgctttaaaactctgctgggtaaagacgcggcgcgcctgccgctggcggtggtctggctgtttacctggcccggcgtgccatgtatttattacggcgatgaagtcggcgtggacggcgcaaatgaccccatgtgccgcaaaccgttcccatgggatgaacgcaagcaggacggcaacttgctggcgctgtaccagcgtatggcgaaactgcgccagagcagtctggcgctgcgtcgtggcggatgccaggcgctgtatgccgaaggtgacgtagtggtattcgtgcgagtttatcagcagcagcgggcgctggtggcgattaaccggggcgaggcctgtgaagtggcgctggaagcgttgccgttgctgaacgtggccggatggcaatgtaaaacgggaagcggtgatatccgcgagggaagacttagtttacccgcgatttccgcgacggtatggatgaatcgttgaggcgaggtggttcgtaacaccttacgcataaaaaaggctcgcattcgcgagccttttatcaatgcactgacttacaggctggaaatgttctcagccaggtatttagccacgccgtccggagaggcgttcatgccttctttgcctttttcccactgcgccgggcagacatcaccgtgctcttcgtggaactgcagcgcgtcgaccatacgcagcatttcgtcgatattacgacccagcggcagatcgtttacgacctggtggcgaacaataccgttagcgtcaatcaggaaagagccgcgcagcgcaacgccttcgtccgggtgttcgataccgtaagctttctgaatttcacgcttcacgtcggcgaccattgcgtatttcaccgggccaatgccgcctttatcgacaggggtgttacgccatgcgttgtgaacgaactcagagtcgaaagaaacgccgaccacttcaacgccgcgcttctggaattcttcataacgtttatcaaaggcgatcagctcagacgggcaaacaaaagtgaagtccatcggccagaagaacagaacggtcgttttaccattggtgtgctgtttgaagttgaatttatcaacaatctcaccgctacccagtaccgccgcagcggtgaaatccggggcctgacgagtaaccagtaccataataattctcctgcaatattaagggttttagaacgcaacgcgggcagtatagggagggcgaagcgacaaaacaatgcggtcttgacaatcaatgagacagcttttgcctatcgatcgggtcattataaatcgtaatgatgacccttttatgacagcgaacgatctttctgccaacggcggatctgacgcacgccctcgctatcaggccgtcacagcgctttgcgggcggcctgtgccatcatacgcggataaaaatgccagaagcgctcttctaacgcgtcgtagtgcgcgtccagatcgtaccaggaatcacgcaaggcatccagccggggacggcgattcgccatgccattcagcacgttttgaatgaaatccatatcgcgataccgctctaaccatttttctgaccaaagataatcattcaggttgacaaagcgcggcggggagtcgggcagaatcgtcgcgacctgcgcatgggcgtagccgacaaacgcctgaagtggaaaatcgggagagatttgcgtccagtgacgcgataaaaaatgatcccacatgacgtccagcgtaatgggcgccacgcgccgcgtttcatggcggaaccactctcgcgcctcacgaacttccggcaggttgtcggtcatgacgtcaatacgccgatgcatataaataccctctaccacgtcaggaggataatgcgttgccgggttaccgcggacaaaatcggccagaagattaccggaaagcgagctgtcggcaaggtgcgccagatgcaggtgagcaagaaaattcattattgattctctgtccaaaaagcgggtaacggttgcagcgggaacgccccggcactagactacccgcctcttattttagtctgagtcagagtcatgcgcgttaccgatttttcctttgaactacccgaatccctgattgcccactacccacagccggaacgcagtcgctgccgtttgctgtcattagaggggccgacgggcgcgctgacgcacggtactttcaccgatctgctcgataagctcaaccctggcgatttgctggtcttcaataatacccgcgtgatcccggcgcggctctttggccgtaaagccagcggcggcaagatagaagtgctggtcgaacgtatgctcgatgataaacgcatcctggcgcatattcgcgcttctaaagcgccaaaaccgggtacggaactgctgctgggcgacgacgaaagtattcacgcgaccatgaccgcgcgtcacggcgctctgtttgaagttgagtttaatgacccgcgtccggtgctggatattcttaacgccatcggccatatgccgttgccgccgtatatcgaccgtccggacgaggacgccgaccgcgaactgtaccagacggtctacagtgaaaaaccgggcgccgtcgccgcgccgaccgcggggctgcactttgatgagccgctgctggcggcgcttcgtgagaaaggtgtcgaaatggcgtttgttacgctacacgtaggcgcgggcactttccagccggtgcgtgtcgataccattgaagatcacatcatgcactccgaatatgctgaggtgccgcaagaggtggtcgacgcggtgctggcggcgaaagcgcgcggcaaccgcgtgattgctgtcggcaccacctcggtacgctcgctggaaagcgcggcgcaggcggcaaaaagcgatttgatagagccgttcttcggcgatacgcaaatctttatttatccaggttatcaatacaaagtgattgatgcgctgatcaccaacttccatctgccggaatcgacgttgattatgctggtttccgcatttgccggttatcaacacaccatgaatgcctataagactgcggtagaacaaaaatatcgcttttttagctacggggacgcgatgtttatcacgtacaatccgcaggctatttctgagcgtccgtaagaaggctatctcacttgccattttgacgccgggcagtgctcgccatcctcacgtactgcgtgtacgctccggtggctgtgcgctggtcgaccccaaactggctgcgccgatgacgtcttcgggaatttattagctatggaatcattccgtagcgagtcgttaaacgtcggactgtttttctgacgcaggagtgataatgaaatttgagttagataccaccgatggtcgtgcgcgtcgcggtcgtctggtgtttgatcgtggcgtagtggaaacgccagcctttatgcctgtgggtacttacggtaccgtgaaaggcatgacgccggaagaagtggaagcgaccggcgcgcagattattctcggcaacactttccacctgtggctgcgcccgggtcaggaaatcatgaagctgcatggcgatctgcacgattttatgcagtggaaagggccgattctcaccgattccggcggcttccaggtcttcagcctcggcgatattcgtaagattaccgagcaaggcgtgcacttccgtaacccgatcaacggcgatccgattttcctcgatccggaaaagtcgatggagatccagtacgatctcggttccgatatcgtgatgatctttgatgaatgtacgccgtacccggcagactgggactatgctaaacgctcgatggagatgtcgttgcgttgggcgaagcgtagccgcgaccgttttgatagccttggcaataagaatgcgctttttggcatcattcagggcagcgtttacgaagatttacgcgatatctcggtgaaaggtctggtagagattggctttgatggctacgctgtcggcggtttggctgtcggtgagccgaaagcagatatgcaccgcattctggagcacgtttgcccgcagatcccggctgacaaaccgcgttacctgatgggcgtgggtaaaccggaagatctggtggaaggggtgcgtcgcggtattgatatgtttgactgtgtcatgccaacgcgaaatgcccgtaatggtcatctgtttgtgaccgacggcgtggtgaagattcgtaatgcaaagcataaaagcgacaccagcccgcttgacgccgagtgcgattgctacacctgtcgcaattattcacgcgcttacttgcatcatctcgaccgttgcaacgaaatattaggtgcgcgtctcaataccattcataacttgcgttactaccagcgtttgatggcgggtttacgcaaggctattgaagagggtaaattagagagcttcgtaaccgagttttaccaacgtcaggggcgacccgttccacctttgaacgttgattaattttaataatgagggaatttgaatgagcttttttatttctgatgcggtagcggcaacaggtgctccagcgcagggcagcccgatgtctctgattttaatgctggtggtgtttggtctgattttctatttcatgatcctgcgcccgcagcagaagcgcaccaaagagcacaaaaagctgatggactccattgcgaaaggtgatgaagttctgacgaatggcggtctggtcggtcgagtgaccaaagtagcggaagccggctacattgccatcgcgctgaatgacaccacggaagtggttatcaaacgtgacttcgtagctgccgttctgccgaaaggcaccatgaaggcgctgtaatatttcgttttcccaaagggaactgccgtgttaaaccgttatcctttgtggaagtacatcatgctggtcgtcgtgattatcgtcggcctgctttacgcacttcccaacctgtatggtgaggatccggctgttcaaatcactggcgtgcgcggcgtcgccgccagtgagcaaacgctgatccaggtccagaaaacgttacaagaagaaaaaattcccgctaagtctgtggcactggaagagggcgctattcttgcgcgcttcgacaccaccgatacccagctacgcgcccgtgaagcgctgatgagcgtgctgggggataaatatgtcgtggcgcttaaccttgcgccggctacgccgcgctggttggcggctattcacgccgatccgatgaagctcggtcttgatctgcgcggcggcgttcacttcctgatggaagtggatatagataccgcgttaggtaaactccaggaacaaaatatcgatagcctgcgcagcgatctgcgtgaaaaaggcattccttataccaccgttcgtaaagaaaataattatgggttgagcatcacgttccgtgacagcaaagcgcgtgatgaggcgatcgcctatctgacgccgcgtcatcgtgacctggtgatttccagccagagcggtaatcaacttcgcgcggtaatgaccgatgcgcgcctgagcgaagcgcgtgaatacgccgttcagcagaacattaatattctgcgtaaccgtgttaaccaactgggcgtcgcggagcctgtcgtacaacgccagggcgcagaccgtattgtggttgagctgccgggtatccaggataccgctcgcgcgaaagaaattctcggcgcgaccgcgacgctggaattccgtctggtgaataccaacgttgaccaggccgccgctgctgccgggcgcgtaccgggtgattccgaagtgaaacagacccgcgaaggtcagccggtggtattgtacaaacgcgtgatcctcaccggcgaccatatcaccgactcgacgtccagccaggatgaatataaccaaccgcaggttaacatctcgctggatagcgcaggcggcaatatcatgtctaacttcactaaggacaatatcggcaaaccgatggcgaccctgtttgtggagtataaagacagcggtaagaaagacgctaacggtcgcgccgtactggtgaaacaggaagaagtgattaacattgccaacatccagtcccggctgggtaacagcttccgtattaccggtatcagcaacccgaacgaagcgcgtcagctctcgttgttgctgcgtgcgggcgccctgattgcgccgattcagatcgttgaagagcgcaccattggcccgactctgggtatgcagaacatcaagcagggcctggaagcctgtctggccggtctggtggtctccatcctgttcatgatcttcttctataagaagtttggtctgattgcgaccagcgcgttagtggctaacctagtgttgattgtcggtatcatgtcgctgttgccgggggcaacgctcagtatgccggggattgcgggtatcgtgttaacccttgcggtggcggtcgacgccaacgttctgattaacgaacgtatcaaagaagagttgagtaatggccgcacggtacagcaggcgataaacgaaggctatgccggcgcgttcagttccatcttcgatgcgaacatcacgacgctgattaaagtcatcattctgtatgctgtcggtaccggggcaattaaagggttcgcgattacgaccggtatcggtgtggcgacgtcgatgtttaccgcgattatcggtacgcgtgctatcgtaaacctgctatatggcggcaagcgcgtcactaagctgtcaatctgaggagtgcgatgtggcacaggaatacactgttgaacaactaaaccacggccgtaaagtctatgactttatgcgctgggacttctgggcattcggcatctccgggctgttgctgatcgcggccattgtcattatgggcgtacgcgggtttaactgggggctggatttcaccggtggtacggtaattgaaatcacgctggaaaaaccggctgaaatggacgtgatgcgcgaagcgctgcaaaaagcgggctatgaagagccgcagttgcagaactttggcagcagtcacgacattatggtgcgtatgccgccaaccgaaggtgaaaccggcggtcaggtactgggtagcaaagtggtgacgatcattaatgaagccaccaaccagaatgcggccgtgaagcgtattgaattcgtggggccaagcgtgggcgccgatctggcgcaaaccggcgctatggcgctgctggtggcgttgatctctatcctcgtttatgtcggtttccgctttgagtggcgactggcggcaggggtggtcatcgcgctggcgcacgacgtgatcattacgctggggatactgtcgcttttccatatcgagattgacctgaccattgtggcatcgttgatgtcggtgatcggttactcgctgaatgacagtatcgtggtctctgaccgtattcgtgaaaacttccgcaaaatccgtcgcgggacgccttacgaaatctttaacgtgtcgctgacccagacgctacaccgtacgttgattacctccggtacgacgttagtggtaattctgatgctgtacctcttcggcggtccggtactggaaggcttctcgctgacgatgctgatcggtgtctctattggtacggcatcttctatctatgtcgcatcggcgctggcgctgaaactcggtatgaagcgcgagcatatgctgcagcagaaagtcgaaaaagaaggggcggatcagccgtccattctgccgtaaacacgtatttaagtgttatctgaatcccggtcatgcgatcgggatttttttatttatgtaccatgacgataaacattactgacagtatgctgtcaggagccctgtcatacactcctcatgaatttacccacactcgcaggaggatgtatgaaaaacttgattaactggtttgaaattccagttactgatatggcgcgtgcaatcgccttttatgagcaagtgatgcagatatcgttacgtcgggaaaccatggatggggcggacctggccgtattcccgtatgctgaacccggacccggcggagcgctgataaagcaggatgatgtcgctccagttgcgcagggagtcgttatttatctgcataccgccgatttgttagcctcgattgaacgtgtcgtccttgccggtggcaagtgtgttctggaacccatggttcccggagatgacattggaaccatcgcgttgtttattgacagcgaaggcaaccgaataggtttacatcaacctgcgtgatatttgctaaatgtagagagtcaatatgaccagacgcgctgaccgtttgtttcagatcgtgcaaattttgcggggtagacgactgacgacggcagcgctgttggcacagcggcttgcggtttctgaacggacgatttatcgcgatattcgcgatctgtcgttatccggtgtgcctgtcgaaggtgaagcggggagcggataccgtttaatggcaggttttgatctgccacccttgatgcttacccatcgtgaatcggaagcactgatggtggctatacggttattgaaaacctggggcggcgattcgctatcacgcgagcttgaatccgcccaggaaaaagtgttggccattttgccggaagagagccgccgtaaagcggagcagacacggatttacgctccggatttgggtacatctccacattcgcgcagcgcgtttgatcttatccatcaggccgtttcggcgcagcaggtgttggcgctacattatcgtgatgaagcggggcatctctcttcgcgggatatacaaccgctgggattgtttttctggggagagcactggctgctggttgcctggtgtgagagacgggaagactatcggtgttttcgcctcgatcgctgtttacaaattactccgcttaaccggcgatttcgtgaaacaatcgaccgttctttgcgtgattttttgcgaaaagtcgagcacgaaaaaatgccgtaagatgtgatagcgatacctctaacgcttgtaaaacgggttgattggtcatcagtttgcctgaaatagccttgcttacctggatatataagttgcacagaatcattgctaaaagcccggcttcgcgggaaactgggcataaccctttgtattattcaggtacctgttaattatggctatcatcccaaaaaactacgcgcgcctggaaagcggctatcgtgaaaaagcgctgaagctgtttccgtgggtgtgcggacgttgttcccgtgagtttgtgtattcaaatctgcgtgagctgacggtgcatcatatcgatcatgaccacaccaataacccggaagacggcagcaactgggagctattgtgcctctactgccacgatcatgagcattctaaatataccgaagccgatcagtacggttcgacggtcattgccggggaagatgcgcaaaaagatgtcggcgaggcgacttataacccgtttgccgatctgaaagcgatgatgaacaaaaagaaataagcagactgctgacaaagctgttggtgctgttgaatgttaggttacgcttcgctccacccaacggaatccgcaatataaatgaattattggttttcgtaggtcggatgcaatctggcattttttcagccccggagtttgtcgccagccccaaatgtcctgtaacgcatacattgtcactggaatcccgatcgcaaggttgggatttttttgtttttaagtcctgccgatactggcgagcagagtagaatcagcggtaagccggggcaacccggtgaggcgcaatgttgcgggggcttgatccccggtggccttgtcgctggaaagagaaaacccccgcacattgttcggtattcaccggcaacattacgggggctaacttgactccagacaagttgaggatagccgcgaaccgttgccattgcaacaaaggcggcaatatgacgctcacagagttgagcattactatctggcacgatctggcggcaccaacgctggtcgggattgcgacaggtctgtttttaggctggtggcatcgccggaagtaatgtgaagtgggcgcgactcgccgccgcatggcagcatgcgcccgaaacgggccagaggacgacctctggccttttttgcaggtttagaagttgtaacccacgaccaggtagccgccccagccggtagatttcgcgctgaaatcgccgtcgccccagttcagttttgcgccattctgccactgtccgccgttatggaagtaacgcgcaacgaccgagtagtgccagtgatcgtagttcagcgccaggatatggctggaagcgatggagttgctggtacggttcggatcgtcgcctaaatcagatccccagtcaaagttggtaaagccgatatagctcagtttaccgccccacagatcggtgatggggacgaagtatttcactttgaaacggtagccgtcccattcgttttcattggacgcgccgtagttttgccactgatatttcgcatacacgttcagcgacagacccatcggcaggccggtgtcgatatcggtccccagacccatataccacgtgctctggcggctggctttgttatcgcccatatcgtagatgtagttgttggcgaaataccactctttaaacgggccgaagctcaggtctgcgccggtcagcttatcaattgagaaacgcggttcgatttccatgaacagcggagaaccgtcggaccagatacctttatcgttgccgttaccccaatcaaaggttttgggaatatcgatatagccgtagaaatcaaaccagtcttttttggcaaatgcttcatattccagatagacgtcgttgttcaatttcggcgagaaacgggtatggtagctgcctaccacgtttacgctctggtgccaccagtcggacaaatactgcggctgatcattttctgctgcgttagcagtaaaagatgaggtgagcgccagcgctgcgctgactgcgagtaaagtttttttcatatgtatgccactgtttgaaatcccttgcgggagtgaaaagaacgcaatttgcgtttctaaatatttcgtgtttctgcggagcctattataaaaatcattgctcacaaaaatatgtcttgtttcacatatctatcatttacgtaatcgattgcgttcacgtttgcgcattttagacgcggcgacagtactatctttcatgaatattaccaatccatgtcataaatgacggaaatgtcagtagggcaacaaaagtcgcgcgggggatgttgcggaacgcacaaaacgctccgccagaacgtttattgattaacaggctgaatatcatggatgcgaatgaagcctaactgcgccggtgtgatccccttcaacggtaacgaaatattgacatcactgggcgccagcaagctggctggggcatttaccagaaggctctgtgcattcacctcctgatagttctccgtagtgccctgaagttgcccgtactctacggtagcgctgaatgccggcagtggatcgcgggactcgccctgaatgtgtaacgttgcgtgagcgccgtctgcgacaggcgtaatttccagcaatgtcatacgtagcgtaccgatctggctctccagccgggcaggcgtattggcgccaggcaacaaatagacgccgcgggttgactccgcattcagcttattttgttgggtaatttttaccgtttcctgattcagttgggtcatctctttattcagggtgctaatgctttgatgcatctggcgaacttcgctctgcggcgcgcaggcggtcaggctcaagagacttcccaccaggagaattcttaggtaacgtcttgtcatgtcgatcatttccttcatggttcgatagcgtaatggtagtgcgctatacgcacaaaggcaccgatcctttatctcaaaagcgctccgcctttgttgtcgcgccagttcagggtaaaataacatttcctaaatcatctggtcaggacgccgtatgcattgcccattttgtttcgccgtagataccaaagtcattgactctcgtcttgtaggcgagggctcgtccgtgcgccgccgtcggcagtgcctggtgtgtaatgaacgctttacgaccttcgaagtggctgaactggtcatgccgcgcgtgataaaaagcaacgatgtgcgcgaaccctttaatgaggataagctgcgtagcggcatgttgagagcgctggaaaaaagacccgtcagcgcagatgatgttgaaatggcattgaaccatattaagtcacaattacgtgccactggggagcgtgaagttcccagcaagatgattggcaacctggtcatggagcagctgaaaaaactcgataaagtcgcgtatattcgctttgcctccgtctatcgcagtttcgaagatatcaaagactttggcgaagaaatcgctcgcctacaggactaagccatgcaggatgagttttacatggcgcgagcgctcaaactggcgcagcgtggacgtttcaccactcaccctaaccctaatgtcggctgtgtcattgttaacaatggcgacatcgtcggcgaaggttatcaccatcgcgccggagagccgcacgccgaggttcatgcgctgcggatggcgggcgcaaaagccaaaggcgcaaccgcctatgtcacgcttgaaccctgtagccatcatgggcgaacgccgccatgttgcgatgcgctgattgcggccggcgtcgcgcgcgtggtcgccgcgatgcaggacccgaacccacaggtcgccgggcgtgggctgtatcgcctgcaacaggcgggtattgcggtcagccacgggttaatgatgagtgaagcggaggcgctcaataaaggcttcctcaagcggatgcgtaccggattcccttatcttcagcttaaactgggcgcctccgtcgacggacggacggcgatggccagcggcgaaagccagtggatcacctcgccgcaggcccggcgtgacgttcagcgcttgcgtgcgcaaagccacgctatcttaaccagtagcgcgacggtattggctgacgatccggccttgacggtgcgttgggcggagttagacgcctctacgcaggcgtcttacccgcaggaaaatctgcgccagccggtgcgaattgttatcgacagccaaaaccgggtaacgcctgcgcatcgtattgtgcagcagcctggcgaaacgtggatcgcgcgtacccaggaagatagccgcgcgtggcccgatgcggttcgtactatcagcgtgccggcgcacaacggacatttggatctggttgtgctgatgatgcagttaggcaggcagcagattaatagcatatgggttgaagccggaccgggactggcgggcgcgttgctgcaagccgggctggtggatgaactgattgtctatgtcgcgcctaaattgttgggaacccaggcgcggggattatgcgaattgccggggcttgagaagctcgccgacgcgccgcaatttaccttcagcgaaatacgtcatgtcggcccggatgtttgcctgcatatggtgagcgcatgagttctcccgtcgaaaggggagcagcgctcaaattattatgataaaatccgcccccctgcggggccaaatgaaccctggaagagagaatatgaacattattaaagctaacgttgcagcccctgacgctcgtgtcgccatcactattgcgcgtttcaatcagtttatcaacgacagcctgctggatggcgcggttgatgccctgacgcgtattggtcaggtaaaagatgataatattaccgtagtgtgggtgcctggcgcctatgaactgccgctggcgaccgaagcgctggcgaaaagcggtaaatacgacgccgtggttgcgctgggaaccgtgattcgcggggggactgcgcactttgaatatgtggcaggcggcgccagcaatggcctggcaagcgttgcccaggacagcggcgtgccggtagcctttggtgttctgaccaccgagagtattgaacaagccatcgaacgtgctggtacaaaagccggtaataaaggcgcagaagctgcgctgaccgcgcttgaaatgattaatgtattgaaagccattaaggcctgattttttgtaaggggaattccgtgaaacctgctgctcgtcgccgcgcccgtgagtgtgccgtccaggcgctttactcctggcagttgtcccagaacgacatcgctgatgttgaataccagttcctggcggaacaggacgtaaaagacgtcgacgttctctatttccgtgaactgctatccggggtggcgactaacagcgcgtacctggatggtttaatgaaaccgtatctgtcccgcctgcttgaagagctgggacaggttgaaaaagccgtgctgcgtattgcgttgtttgagctgtcaaaacgcagcgatgtgccttataaagtggccatcaacgaagcgattgaactggcgaaaacctttggcgctgaagacagccacaaattcgtcaacggcgtactggataaagcagctccggtgattcgtcccaacaaaaagtgattcacaggccggaaagatagcgggcgctcgatacccgccgtctccggccttttctttttttctgctgaggcataacgtatggcatgtggcgagttttccctgattgcccgttattttgaccgtgtaagaagctctcgtcttgatgttgaaaccggtattggcgacgattgcgcgctcctgaatattcctgaaaagcagaccctggcgatcagtaccgatacgctggtggcgggcaaccacttcctccctgatatcgatcctgccgatctggcttataaagcgttggcggtgaatttaagcgatctggccgcgatgggggccgacccggcctggttaacgctggcgttaacgctaccggaagtggatgagccgtggctggaggcttttagcgacagcctgtttgcgctattgaattactacgatatgcagctcattggcggcgacaccacgcgtggaccgctgtcgatgacgctgggtatccacggttatatcccggcagggcgcgcgctcaagcgatctggcgcgaagccgggcgactggatttatgtcaccggtacgccgggcgacagcgctgccgggctggcggttttgcaaaaccggctacaggtgtcggaggagaccgatgctcactatttaattcaacggcatttacgtccgacgccgcgtattttacacggccaggcgctgcgtgacatcgccagcgcggctatcgatctttccgatggtctgatttccgatctggggcatatcgtcaaggccagcggctgtggggctagagtggatgttgatgcgttgccaaaatccgatgcgatgatgcgccatgttgatgacgggcaggcgctgcgttgggcgctttccggcggcgaagactatgagctgtgctttacggtgccggaactgaaccgtggcgcgctggatgtcgccattggtcaactgggtgttccctttacctgcataggccaaatgagcgcagatattgaagggctgaattttgtacgtgacggaatgcctgtcaccttcgactggaaaggatatgaccattttgccacgccataaagatgttgcgaaaagtcgcctgaatttgcgcaatccgtggcacctgctcgctaccggctttggcagcgggctgagccccgtggtgccgggcacgatgggctcgctggcggcgatccccttctggtatttgatgacgtttctgccgtggcagctttattcgctggtcgtgatgtttgggatctgcattggcgtttatctttgccatcagacggcgaaagatatgggcgtacacgaccacggcagtattgtctgggatgaatttatcggtatgtggataacgctaatggcgttgccgacgacggactggcagtgggtggctgccgggttcgttattttccgcattctggatatgtggaaaccctggccgatccgttggtttgatcgcaacgtgcacggcggcatggggattatgatcgatgatatcgtcgccggggtgatatccgctggcatactgtattttatcggtcatcactggccgctcggtattatttaaagggtttgccggatggcggcataaacgccttatccggcctgcccctgaacaatatgtcgatttcgcaggcccgataagcgccgcgccatcgggcaatggcagattatttaaatcccactaccggatgctgtttgtacggcgtttcgagttcggcaatctgctccggtttgagcgttaaatcaacggcattcagcaactcatctaactgttcttcacgcgaagcgccgataatcggcgcggcgacgcctcgtttgctgagcagccagcccagcgcaacctgcgcccgcgttgcgccaagcgcctcgctgacgccagccagccgttccgctatttgcgcatcatttttatcgctttcatcgtataaatttttacccacgtcatccgagaccaggcgggccgtggtttctccccaggggcgagttaagcgcccgcgcgccagcggactccacggaatcacggcaacgccttcctgccagcacagcggtagcatctcacgctcttcctcgcggtagatcaggttatagtgatcctgcatggtgacaaacggcgcccagccgtgttgtttttgtagcgccagcgcctgggcaaattgtgaggcgtgcattgaggaagcgccgatatagcgggctttacccgcctttaccacgtcgtttagcgcttccagagtttcttctatcggcgtggtgtaatcccagcggtggatttgcaggatatcgacatactccattcccagacgggcgaggctatcgtcaatagagcgcaggatttgtgcgcgggacaatccttccggcagatcgccgacgcgatggaagactttcgtcgctaccaccacctcgtcgcgccgggcaaaatcacgcagcgcgcgaccgacaatctcttcgctgctgccgtcggagtagctgttggcggtatcaaaaaagttaatgccgccctcaagagcgcgcttgatgatgggacggctgctctcttcgggaagcgtccaggcgtgattgccgcgacttggctcgccgaatgtcatacagcccagacaaaggcgggatacccgaagatctgtatttcctaacgtgttgtattgcatgactccgctcctgttatacccgtcactcttcaagcatagcaggagcaaagaggggattatgccagccaggccttgattttggcttcaatgcctgcggcgtcaagccccagttccgcgcgggcttcttcctgcgttccttgcgggataaagaaatccggaagaccgatattcagcacaggtacaggtttacgatgggccattagcacttcgtttacgccgctgccagcgccgcccataatggcgttttcttccagcgtcaccagcgcgtcatgctgcgcggccatctccagaattaacgtgtcgtccagcggcttaacaaagcgcatgtcgaccagcgtggcgttcagcgcttcggcgactttcgccgcctcaggcattaaggtgccaaagttcagaatcgccagtttttcgccatgacgcttcacaaggcctttaccaataggcagtttttccagcggggttagcgccacgccctgcgcattaccgcgtggataacgtactgccgtcgggccgtcgttatagtgatacccggtaaataacatctggcgacattcgttttcgtcgcttggcgtcatgatcaccatatccgggatgcagcgcagataggagagatcgaacgcgccctggtgtgtttgtccatccgcgccaacgataccggcgcgatcgatggcgaacatgaccggcagtttctggatagcgacgtcatggatgacctgatcgtaggcgcgttgcaggaaagtagagtagatcgccacgacgggcttatagccgccaatcgccagacctgcggcgaaggtgacggcatgctgctcggcgatggcgacgtcaaaatagcgatccgggaatttacgtgaaaattccaccatgccggaaccttcgcgcattgccggggtgatcgccatcagcttgctgtctttggcggcggtttcacacagccagtcaccgaagatttttgaataaccgggcagaccgccgctgcttttcggcaaacatccgctggagggatcaaatttaggcaccgcatggaaagtgatcggatctttttccgcgggctcatagccgcggcctttcttggtcatgatatgcaggaactgcggccctttcaggtcgcgcatgttcttcaatgtgctgataagccccatgacatcgtgaccatcgaccggcccgatgtagttaaagcccagctcttcgaacagtgtgcccggcacaaccatgcctttaatatgttcttcggtacgcttgagcagttctttaattggcggtacgccggagaagaccttttttccgccttcgcgcagagaagagtaaagcttaccggaaagtagctgcgccagatggttgttgagcgcgccgacgttttccgaaatcgacatttcattgtcgttcagaatgaccagcatgtcgggccggatatcgcctgcgtgattcattgcttcaaacgccataccggcggtgatggcgccgtcgccaatcacacagacggtgcggcgatctttgccttctttctccgccgccacggcaataccgataccggcgctgatggaggtggaggaatgcccaacgctcagcacatcgtattcgctttctccgcgccacgggaacgggtgcagaccgcctttctggcgaatggtgccgattttgtcgcgacgaccggtaaggattttatgtggataagcctggtgtccaacatcccagattagctggtcaaacggggtgttgtagacataatgcagcgccacggtaagttctaccgtgcccagcccggaagcgaaatgcccgctggaacggcttacgctgtcgagtaagtagcggcgtagctcgtcgcagagtttcggcagactctctttcggtaacagtcgtaactcctgggtggagtcgaccaatgccagggtagggtatttggctatatcaaaactcatcgcaagctcattggatatggggtttatttatcacgctggattatgtagttcgctagcgcttccagtgccgaggtgtccagtgattgcgcggccagctgatgtaacgactgacgggcgtcctctatcaggtcccgggctttattccgggcttgctcaagacccagaagtgcagggtaggtacttttgccaagctgctggtctgcgccctgacgtttacctaacgttgcagtatcgcccaccacatccagaatgtcatcctgaacctggaaggcaaggccgatactctctgcatagcggtcaagtatcggcagagtattccgtcctttatcgcccgcgctcaatgcgccaagtctaacggcggcgcgaatgagcgcgccggtcttatggcgatgaatgcgttccagcgcgtccagagtgatccgctggccttctgccgccagatccaatgcctgaccgccgcacataccggcgataccgctggcgtttgccagttcggcgatcatcgcgatacgatcgcgatcggcgacttccggcatcggcgcgtcgctgataatggcaaacgccagcgtctgcaacgcgtctcccgccaggattgcgttggcttcgccaaatttaatatggcaagtcggcaggccgcgacgcaaatcgtcatcgtccattgctggcaggtcgtcatggatcagcgaataggcatgaatgcattcgaccgccgcagctggcgcatccagcgttgccgtactgacgccaaacatttgaccggtggcgtaaaccagaaatggccgcaggcgtttaccgcctaataatgcgccatactgcatggcttcgaccacgggagtgttctgaaagggcagtggcgcgataaaacggctcagcgcctgattcgcttgcgttacgcaagcctgtagctgctgcgtaaagtccatttactcattatccgcgataaaaggctcaggtgaagcctcttcattatcagacagcaaaatttgcacgcgctgttccgcctgctgcagttttgcctgcccctgacgcgccagttgtacgccgcgctcgaattcattcagcgcgtcttccagcggcaaatcgccgctttccaggcgggtaacaatatgttccagctcgctcagcgcagtttcaaagctggcgggcgcctcatttttcttcggcatgatgactgtttgactctctgtaatggcagtacaagtctatggtaacggactcacactgataagcaaataacgcgcaatggtaaggggaaatgcgcaagatgtccgtgatagtgatatacttccgcgcctggatgcagccgtaggtatgggctgctgtactatttctccacgacaagccttagatagcttgctaaagaaccattgccgccatgaagtttatcattaaattgttcccggaaatcactatcaaaagccaatctgtgcgtttgcgctttataaaaattttaaccgggaacatccgtaacgttttaaagcactacgatgagaccctcgcggttgtccgtcactgggataacattgaagttcgcgccaaagatgaaaaccagcgtctggtgattcgcgacgcgctgacccgcatcccggggattcaccatattcttgaagtcgaagatgtgccgttcaccgatatgcacgacattttcgagaaagcgttggcgcagtatcgcgaacagcttgaaggcaaaaccttctgcgtgcgggtaaaacgtcgcggtaagcatgagtttagctccattgaagtggagcgctatgttggcggcggattaaatcagcatattgaatcggcgcgcgtgaagctcactaacccggatgtgacggtgcatctggaagtggaagatgatcgcctgctgctgatcaaagggcgttatgaaggtattggcggtttcccgattggcacccaggaagatgtgctgtcgctgatctccggcggttttgactccggcgtctccagctatatgctgatgcgtcgcggctgtcgcgtacactactgcttctttaaccttggcggcgcggcgcatgaaatcggcgttcgccaggtggcgcattacctgtggaaccgctttggcagctcccatcgcgtgcgttttgtggcgattaacttcgaaccggtggtcggcgagattctggagaaagttgacgacggccagatgggcgtggtgctcaaacgtatgatggtacgcgcggcgtcgaaagtggcggaacgttacggcgtacaggcgctggtgaccggcgaagcgctgggccaggtatccagccagacgctaaccaatttgcgcttgatcgataacgtgtctgacacgctgatcttgcgcccgctgatctcttacgataaagagcacattatcaacctggcgcgccagattggtacggaagattttgcccgtacgatgcctgaatactgtggcgtgatttcaaaaagtccgacggtgaaagccattaaagcgaaaattgaagccgaagaagaaaacttcgacttcagtattctcgataaggtggtagaagaagcgaacaacgtcgatattcgtgaaatcgcccagcagacccagcaggaggtggtggaagtagaaaccgtgagcggtttcggcccgaacgacgtgattctggatatccgttctgtggatgaacaggatgacaagccgctgaaagtggaaggtgtggacgtcgtttcgctgcctttctacaagctgagcactaaatttggcgatctcgatcagagtaaaacctggctgctatggtgcgaacgtggcgtaatgagtcgcctgcaggcgctctatctgcgcgagcaggggtttgccaatgtgaaggtgtatcgtccgtaattcctttgccgggtggcggctatgtcctacccggcctatcgttttatttctgccccaaccgttttgcaatgcgctccagcttcatcatcagcagcagcgtaatggccaccagcacaatggtcagcgccgcgccgtcggcgatatttccacggtcggtcaagctaaagatagccaccggcagcgtcgtccagcccggcggataaatcatcatcgtcgcgcccaactcccccatggagagcgataaactcagcgccagcgctgacatcatccacggcatcaataacggcaacgtcacgtgacgcagacgataccagggcgatgcccccagactcgacgcgacgttttcaatatcggcggaaattcgcgccagtccggtcgacacgttactgaaggtaaaggcggaaatcagcacaaagtgcgctgtcagcacaatccatagggtgccgttcatttgcaatggcccctggctgaaagcaaccagaatgcccaggcccacggacactgacggaatcgcactcggcagatagaacaccatacttaaccatttctgcgttttcaccccatattgacgcagcgccagcgccgcccaaacgccgcaaagcagcgcaaacaggctggcgcaaaagccaatcgtgaggctggcaagtagggcatcccatgccgcaccgtgcagagcgttaacaaagtggttcagcgtgaagccactcggcagaataccgttccactgctggctaaggctggacatcagaatcaccgccagcggcaggaaaaagaacacgataaacagtacgctagccacaacgcccgccgctgcgcgtcctttaggtgaccaaattagcatggctagctccttacgccggtacgcgatgccgccaggcgatagagggagaacagccccagcgacaagacaatgttaatcaacgcaatcatgcaggcgaccgtatagtcggactccagaatcgctttgctgtaaaccatcatcggcagggtgttaacccctttcgcgccaataaacagtacgatgccgaactcgttagtggtcaacagcaggcacaggctgccaccagccatcagcgccggtagcgcagccgggaaaatcacctgcccaatcacccgtaacgggtgcgcccccagaatactggctgcctctagctggcttttatcaatttgccgcagcgcggccatcagtggccgcatcaccagcggagtgaacaccgtgatctccgccagaatgacgccctgcatcgagtagagaaaatccaccggcggtagctcaaaggcaaacaggctcatcagcgtaccgttgagcagacccgctgacccataaataaaggtgaacgccagcgtaatcaggaaggtcggcagcgcaataaaagtatcgacgacccgaccaatcaactcgctgccggggaaaggaataaacaccagaatcagcgacatcacgctgcccagcagcaggcaaccggcggtggcgaaaaaggcgatttgcaacgtgttcagcaacgcgccgacaaagcgtttcgagtcgaccacctggcggaaggtctcgagcccgatctcgccattggcaccgcgtagcgcctgttcaacgatgagcgacagaggccagaaaaacagcgtcgccagcaccagcaacgggagcagcagccacagcagcgggcgtaggttaagcgccggtttttccagaggtaaaatgagtgacatggttatacctcaatcaggaccgcatcatccggttcgaaccacagcgccagcttgtcgcccacgcgcggcagcggattgacatgcgtcaacaccatccgcaccgtttcgccagcaacgtcacacagcagatgggttaaatcgccctgccagtgcaccgattgcagtgtggcgttgaagcggttgctgtaggccgaacgcggcgtcaggctgaggtgctgaggacgaatgcacagcagtttgttgtaaccgtggtggctgccccggctgaacgcgcgaatcaccgcaccgccgcagctgacgtccaccagccccggagcctccgttatccccagcgcgatggcggagagaatattggcgcgacctaagaattcggcggcaaaacgattgggcggatgctgatatagcgcgcgggtttcgccgtgagcaatcagcgagccatccttcataatgccgattttatcggccagagtgagcgcttccgtttgatcgtgggtgacgtagagaatagtgagttccggcagctcacggtgaagacgggcgatttcttccaccatattatgacgaatctgtgcgtccagcgctgacagtggttcatccagcaacagcacgcgcgggcgcacggcaatcgcgcgggcgatggccacgcgttgctgctggccgccggaaagttgatgcggataacgggcggcgtaatcactcatgccaaccgttttcagcgcctgcgttacacgctcattaattagcgcctttggctgcttctgcgcacgcaggccaaaagcgacgttgtcttccactttcagatgcgggaacaaggcgtagttctgcaccaccatcgccaacccgcgtttatagggtggcagatgggtgacgtccgtatcgccaatcagaatacgaccgcctgcaggttgcacaaagcccgcaaccgcacgcagcaccgtcgtttttccagatcctgatgggccaatcagcgccagcacttcgccaggttcaatcgtcaaagagagcggtttaagcaccacgttgccgtgatacgcaacgcgcagcgagtcgaggactatccccgatgtcccctgcgatgcaggggcgtgaacggtggtcgttttcatcagcatcaggcttactcgctttcggtcactttgtgccaacggctaatatctgccgacagcgaaacggctacgtcatcccaatttggctgccagctctgcacgccttctaacgcggcagtggcggccttataatgttcgtcgctcggcgtcacgtcgctgcgtaccggcattccccaggagagttcgctgacgcgagtctgcgcttctttactcagcaggaagttaatcagctttttaccattttcactctgcggcgccccctggaccaggccaatgacataagggatggccagcgcgctgcgctcgcctttgtcgttggccggccagaagattttcacgttcgggttacgttccatctgcgcgaggttcatttgcaggtcgccgttagcgacgtagatttcacctttattaaccagcgcggttagcttgccggtagaggcagatggcccgacgttattggcctgcagcttgccgagatacgcaaaaccggcatctttactgccgaagctgtggaaagcctgcagcatcaccgccgtgccgtcagcggcctgacctggcgtggaatactggagtttatttttgaatttaccgtcaagcagatcctgccagctcgccggggcagttttcagcagcttgctgttgtagataaagctcagatagttctttaccagcggcgaataaaggttgttggcatcggggatagccgatgcggtgtcggtgttaaagttcgccagcagcttttcggcggcggcgcgctgaatgaatggcggcgcggttaccagcacgtcggcctgtggattcgtgcgctcttttgccagacgttccactaccacgccaccaccgccttcaacatagcgtacggtaatgccggtcgctttggtgaatgcgtcaaactgtacctggtaccagctgttatcgccatcatgcagcccgtcgatggagtacaccgtgaccaccgattccgcccatgacggggcgctggcgagagcgaagacagacagcagagcaagtcgggaaagtttcatcgtaatagcctcatagcgtacgttgcattttctggcctataccaggtttgctttttacgctaaacggcttatatgacaaaacgatgaaagagaaataaatcagtccacgccggatgatgctgcgcttatccggatagccgtgagacgatacgattggtaggccggataagtcccgcagccaacatccggcgcatccgctagtgggtatctacctcaatacgcaggctgtcgtgacgccagtattcgatatccagatccagcactcgcccgtgttgatcgtagttcagacggcgcagcaacagcgccgggcgcccttccataacgcccagcgcctgtgcggcctgcgcaggcatggcggtggggtagaacgacagatgcatgctggtatagacgaggttgtagtgcgactcgtatacctcggtcaggctgccgttgagatcgtactgcagcagctcaggcacgcgggcgggcaaacaatggttttcgcagtagcacacggcgcggccatcggcgtaacgcagacgggtcagcagatagatttgatcaaacggctggagctggaggggctccatgacctcgacaggcacggtggttaacacgccgctcagtagcgcggtttttggctcccgcccctgctcgcggcaaagcttatggaagttggtgttctgggtcggatccagccacaggcgttccggcgtaacgaaccaaccgcgacgatcggcgcgccagataagcccactggactccagctgtgccagactttcgcgaatagtaatgcgcgtggtgttgaagatcgcgcacagttcgcgttcagacggcagtttatcaccgcttttcaacgcaccgctctgaatacgcgcctgaagctgcgccttgatcaacaggtactgcgggatatcgcccgggatagatttcatgcttactcgcttccgttttgcctgccgccattatacaagcagagatgaattttttgttgcagcgcgattttctctttgacccgtcgcggcaaagatcgtcatgataaatgcaatctggtatagaccaaaggtaaataacatgacttcgcgtaactatctgttgctgactcctggcccgctcaccacctctcgcaccgtgaaagaagcgatgttgttcgatagctgtacctgggatgatgattacaatatcggcgtggtagaacagatccgccagcagctgaccgcactggcaacggcctccgaaggctacacctccgtactgctgcaaggcagcggcagctatgctgtggaagccgtactgggcagcgcattggggccgcaggataaggtgctgatcgtcagcaacggtgcatacggcgcacgaatggtcgagatggccggccttatgggaatcgcccatcacgcttacgactgcggcgaagttgcgcgcccggatgtgcaggcgatcgacgcgatcctcaacgccgacccgacgatcagccatatcgccatggtgcatagcgaaacgaccaccgggatgctcaaccccattgatgaggtgggcgctctggcgcatcgctatggcaaaacctacatcgttgacgccatgagcagcttcggcggcatccccatggatattgcagcattacacatcgactatctgatcagctccgccaataaatgcattcagggcgtgccgggttttgcctttgtgattgcccgcgagcaaaaactggccgcgtgcaaagggcattcccgctcgctgtcgttagatctctacgcccagtggcgctgcatggaggataaccacggcaaatggcgttttacttcgcccacacataccgtcctggcgtttgcacaggcgctgaaagagctggcgaaagaaggtggcgtagcggcacgtcatcaacgctatcagcaaaatcagcgcagcctggtggccggaatgcgggcgctgggctttaacacgctgctggatgacgaacttcattcgcccattatcaccgccttttattcaccggaagacccgcagtatcgctttagcgaattttatcgccgcctcaaagagcagggctttgttatctatcctggcaaagtgtcgcaaagcgactgcttccgcatcggcaatattggcgaagtatatgccgccgatatcacggccctgctgaccgccattcgtaccgccatgtactggacgaaataaggaaccatgatgaaccgtattcacgctgttattctcgactgggcgggcaccaccgtcgattttggctccttcgcgccgacgcaaattttcgttgaggcgttccgtcaggcatttgatgtggagatcaccctcgctgaagcacgcgtgccaatggggctgggtaaatggcaacacattgaagcgctgggaaaattacctgctgttgacgcgcgctggcaggcaaagtttggccgctccatgagcgcagcagatattgatgccatctacgccgctttcatgccgttacagattgctaaagttgtcgatttttcttctcctattgccggagttatcgacacgatcgcggcgctacgagccgagggtatcaagataggctcctgctccggttacccacgagcggtgatggagcgcctggtccccgccgccgccgggcatggctatcgtccggatcattgggtggcaacggacgacctggccgcgggtggtcgcccggggccgtggatggcgctgcaaaacgtgattgcgctgggcattgatgcggtcgcgcactgtgtgaaggtagatgatgccgcgccgggcattagcgaggggcttaacgcggggatgtggacggtggggctggcggtatcgggtaacgaattcggcgcaacatgggacgcctatcagacaatgtcgaaagaggacgttgcggtccgccgcgagcacgcggccagcaagctgtacgccgccggggcgcattacgtggtggattcactggcggatttacctggggtgattgcgcatattaatgcgcgtctggcgcagggcgaacgcccgtaaaataactgccggatggcgctgtcgcttattcggcctacagactgtaccgttttgtaggccggataaggtgtttacgccgccatccggcaatcattcttattcgtagtagttataaatccccgccgccatcaccagttgcgaagccacttcatgcgctttttcacgaccagccaacaggtcgatgattttcaaaccaaaatcgatagcggtacccggtccctggctggttaataattttacccgcgcatcccacaccacacgcttatccagccactgttcggcggggatcttatctttcagcgccggaaaaccggtcatattgccgatagggaagatatcgtgcggcacgagcactgtggcggctgcggcgcaaatggctgcgacaatgcgcccggagcggtgaaactgttttacggtttcgaccagcagcgggctgtcgcgaaagcactcggcgcctttaattccgccgggcaacacgatgatgtcataatcgccgtcggcaacttcaaccagcggcgcatccgccagtagctttacaccgcgcgagcagacaatcgtcaggttgccatcgctggcgacgctggcggtagtgacgtggattccgccgcgaaccagcagatcgatagtggtgaccgcttcggtctcttcactaccaggggcgaggcataccagtgcctgagcgctcatactcactctcctttcgctttaccatttcaaacaggcggctattttccggaacggcgagaccgtgcacgcgggcgcgcttgagtaaataaccggtgatgtagtcaatttcggtatggcgcatggcacgcacgtcctgcaacatggatgagatgttttctgccgtactgtcaatcacttgctcaacataatagcgtaaatcgtctgccgatgtgtggtagccttcacgttcaatcacggcggcgacctcttcgcaaatcgcgttgatttcatcagtatgatggcgcagctcgccgttcgggcagttccaaagcgcggtgagcgggttgataacacagttgaccgccagtttgcgccacatctctgcgcggatattgttatgccaggcgacatcgggcagtaccccctgcaggatatcggcgagataactgtaatcgccgtcttgctcgcgcgccgggccaatatgcgtagtaccgttagcgacatgaataatgatattaccgtcgcggcgcgcagcatgggtgatagtccccatcaacatcggctgttggatattttgcagttcttctatggttcccattccattatgaatgagcaggataggcgacgtcaccggtagggttgacgccagggttcgtactgcgtcggaaacctgccacgctttcagcgtgactaataacagttcgctcttcgccaaaaaatccggatcgtttgccgtcagtgattcgttgaaaaaggaaccatcggtatcgatcagatttacgctgcaataaggttgtggcacccgtagccagccctgtacgtcatgtccgtgtttgcacagtgccgaaagccaaagttgtcctaaggctccgcatcccagtacagtaattttcattgttcctcctcacctgcaacagcgccaggtgttatggcgctaattatagcgtcatcagctaagcttctcgttaagcctcgttgcaggtattatgcaacgcaacgaaaatgaagggagaagaaaagatgccatctttcgatattgtttctgaagttgatctgcaggaagcgcgtaacggtgtggataacgcggttcgcgaggttgagtctcgttttgacttccgtggcgtagaggcgactattgaactgaacgatgccaataaaaccatcaaggtgctgagcgagtccgatttccaggtcaatcagttgctcgatattctgcgcgccaagctgcttaaacgcggtattgaaggcgcttcgctggatgtaccggacgagttcgtgcatagcggtaaaacctggtatgtggaagcgaagctgaagcagggcattgaaagcgccgtgcagaagaaaatcgtcaagctgattaaagacagcaaactgaaggtgcaggcgcaaattcagggggaagagattcgcgtgacgggcaaatcacgtgacgatctgcaatcggtaatggcgctggttcgcggcggcgatttgggccagccgttccagttcaaaaacttccgcgattaagttgttatgccggatagagcctcgccgccatccggcaatgcagtattcatcctttgctgataagctgttcaacttcaaagcgattggtcactttgctgtcgattttgacgtaagcggaatgctcttccgccacgatcagcgcttcgcttacgcctttcattgccaacagtcgctgttttagcctgtcgtcagcaacgatatccgctggaatttccacacgcaggctgctgacatagggcggctctttcatggtacttgccactgccagccataccatcgccagtacggccccggcaaggaaaacggtttgcccatcaaacgtgccgtctatccagccgcccagcgagccgccaagcgccacgccaagaaactgactggtagaatagacgcccatcgccgttcctttataccccgcgggcgactctttgctaataagcgaaggcagcagcgcctccatcagattaaaggcgaggaaaaagagttgtacgccaatcaccagctcccagaaatgctggcccgctccccacaacacgatttctgcgacgacaatgagccccacgcagaacaggaatacctgcttcatccgccgtttgacttcagcatagataataaaaggcacgacggcggcaaaggcgatcaccatggttgccagatacaccttccagtgttcggcggcagggaaaccggcatcggcaagctggccgggcagggcgacaaaggtggacatcaataaaatatgcagacacataatgccgaaattgagtttgagcagcctcggctccgccagcactttactgaagctgcctttgaccatcccggattcgcgattcagcacatggttggtactgttgggaaccacccagatcgtcagaagaatgcccagagtggcgagggcggcgatcatccagaacaacgcgttcaatcccagactatgggtaacgatcggccctaataccatcgcaatcgcgaaggtgataccaaagctgacgccgataaacgccatcgctttggtacggttttgctcgcgggtgaggtcagacaggagcgccatgacggcggcggcaatagcgccggacccctgtagcgctcgccccagaataatgccccagattgagtgggagagcgcggcaatgacgctgcccgcgacaaataccgccagtccgccgacaatcagcggtttgcggccaatgcggtcggacagcagcccaaagggaatttgaaagatagcctgcgccagcccgtaaatgccgatcgcaatgccgattaatgcttcgctggcgccctgtagcgccataccgtatgtggtcagtactggtagaaccataaacatgcccagcatacgcaacgaaaagacggtccctaaaccccatgtggcgcgcagctcccctggcgtcattttataatcgttcattgccacctctgtataaaagctgggagtagtgtagtgcggggagtgtgccgggtaaatagagggttaattagcaaatattatgtttttgaaacagttgagctaaaaaagagataaattgttaacacgataggggcgatcgggagagtcagcatagccttgtgctcattcatattccgatctccttgagctgtagtggctatctgagccatctcagtatagtgtagcggttagccacggccttcaggctgtgtgcgctgttgctccatgttgcaatagcagaactcgtcaagccagactgtcagcgaaccgcgctgcctgagtgtggctggccggtgggtgattttaaacttttgctttgccataggaacccgattctgaaacgatggcaatgatcagatccgcccatcttctgaaaatttgatttattcaacaacgccgagactgatagcaaactttctgcgtgatggcgcgcgtttatcaggcagaagattcgtcagcagtcgcatttattatattattcaaggagtgaattcgttatggaaattaaatttttatcattatgtattttagcgggtgttttatttgttagccaggtgaatgcttcagcgaacaacggtaaagatgatgtaaaatatgctgcgcttacccagaaggatcttgatgctttgcctgtggaaaaaagagcttcggttctggatgaactggggtttatccatgaatacggccttagtgtaccgatgaatcgcgaacgggcgttgcagtattacaagcaggcctgtgagcttggcggtaactacggctgttataatgtgaagtatgcttatcagtatggcgacggagtggcgaaagatagcgctcaggccaataagtatgctaagaaaatgaatctggataatttattgattgagcaagaatatattgataagttttcgcaagaaatttacatggcaaaagcattggccgatacggataaatcgcagcgggcggcatttattagtatactaattcatgctctaaataatagacccgagagcgatgcgcttttttttagccgtattggatttaaccaggaaaaaacatttcggctggctacgttatggtcgcaggatggcgacccgcaaatggattatcagatggggcgactcacccttaatgacttttccggtcgctatgcggacgagccttatcaagccagacctgcgtcattgaagtggtttcgcgccgccgcggaaaaaggcgtcgttgaggcccaatctctcttggggggtatttattcggggggagagggcgatgagtgggggattaagccagacattcaggaagcacaaaaatggtatggacaggcggctaagcagggggacagcgatgcacagattgcgttaggtaaaatctattattctggcgcaacagggcgcactgattacgctaaagcgctggcattatttacgcaggttgaaaatgatggtactaattcgcgctcaacgatgccgttgagttggatgtattataacggtttaggtactgcacctgattgtgataaagcctggtcgtattacaagaaagcatctcgatatgtaggtaagaaagttgaggaaaaaatatttttaagtaaatgcgcagcggatattcagagtcgaaaaaacaatgcggatgctttacctaaagtaaccctgaaaaaagagagaattttctctcgcgggataacggctaaaccgaaagaatgcgcactaatttttcagattggcacagataaaatccgtaacatggcgaatttgcatattacgcttgaactgaagaatgctgatggaatggcaactgaggaaacgttgatgattccgccattcggtttgaatactctggggatagatatgcaaaatcatgatgttgatcctctcgttaccccatacgatctcccgctgtatacgcaagatttttgtcacgggatcggcgatatccattttacgctgaaatccgctacggcaacgattaacggtaagaatgtcgatttactgaaagctgacagtgtgcgctttttagataaagaataagggaatgaaaaatgataaaacggaaatggaatcttttgcttctgcttgggctttctttcgcatcggtatgccaggcaggtgatgatattgacgcgttgtatagccgtattgcgcagaaagatattcaggcgctaaatgagctaaaagcgttagccaaagataataacgcccaagcgctggcagaactggggtttatttatgagtacggcgtttcagtatctgtggatattccgcaagcaataaagtactacgagcaggcttgtgatttggacggtgattatggttgctttaatgcggcttatttctatgaatatggcatcggtacccaaaaggacattacgcaagcgaaaacattagcaaaacagcttagagaaaaaattaatctatccaatatcaatctcgataaaaaggtgagtgaacgtataattgggagtgtttatagtaataaacttgaggcatatagagacctttcatttcgtcctcattttattcaaggcttaagtttctatttttatgccccgcaatcagatgagcgaaaactgctgagtcgaataggttttgactcatcacatcttgcgcggatagcgatactctgggcgagagagggtgatcctgaggtcgcgtatcagacggcaaaactggtctctactttgtattttaataatgaaacgaaaacgatagatattgctgaagcgctgaaatggctccgaatttcggccgagaagggggatgccgactcacagacgctgttaggttttctttatgaacacgccggattgggattacaaccagatggagagaaagcccggaaatggtatgaaatggcggcgcagcaaggtaatggagaagcattgtatacgttaggtcgtatgtactattctggcgtactggttaacgttgattacgataaggcgctgtatttttttaaaaaagcttatgagaaaaaattacaggaggccgctgattatttagcacagatgtattttaatggccagagtgtagatgtcgattgccaacaatcctggcactattacgataacagctatataaaaaagatgacacaacgcgattatcttgattattgtgaaaaagatcgaaagcgccgtaatgattttaatcagcaacttcctgagctgacattagaaaaatatgcgggattatttggcaggattgataatattcctctgtgtcagattggatttgttgtcaatacgaataagttaattcatgttgcgaacttacgtgtggaattgatattaaaaaatgatgctggagttagtgacgaaagaatggtcgcttttcctcctttgggtctcaatactctgggtgctgaacagggtatgggggattcttttaagtcgatgggatatctcttgatgaaaaacggtgacttgtgtgattaccataaacttactttcaccgtgaagtcagcgacggcaacaatcaatggtaaaaaagttgatttactgaaaacggataatttacatattattcagaatcgataactcgtggggcgttactgcctgatgaaatggataaaaaaaccgccgtttgtgacacggcggttttttcaatagcaacgcttgttaccagacgtaagtcagcagattctgcgaattcggcaccataaaatcaacggacatcatgatactcagcgcggtaatcgcaatgatagagaagccgaacagcttgcgcgcccagaccttatcatcttccactttgtaaccgcgtagcgccatgccgagccaccaaacgctgaccgccgcggcgaccaccaggtatttgtaaccggcataaccgcccaacgtgagcattagcgttgcaacggcaaacgcaatgatgtacagcgtgatgtggtttttagcgactgagattccttttaccaccggcagaaccgggatattggccgcctgatagtccttaaagcggaaaatggcgatggcgtaagagtgcggcatctgccagaggctgaaaatagccaacaggatcgccgcgccgctgtcaaagtcgcccgttacggcgcagtagccaatcaccggcggcgctgcgccggagagagaaccaatcagcgttccgtagacggagtgacgcttcatgtacaagctgtacacgccaacgtagaccacgaagcccattacccccagccagcaggccagaggattggcgccaaaccacaacagcataaagccagcaatacccagcagggtggcgtataccagcgagacgccaggagaaatcaggcctttgaccagcacccgattcttggtcctttccatcttcctgtcgatatccctgtcgatgtagttgttaaatacacaacccgacgccacaaccagtgacaccccgaccagcgtataaatgaacaggggatagtcaatgctgccctttgaggccagcagaaatcccccgatcaccgagatcaggttgccaaagatgatgcctggtttcgttacttgcaggtattgcttaaacatcatactcgccgctcttagtgcatcatcatgttgtagttgaggttccacataatccagatggagcccacaaccaggatggcgatgatcagcacggtaaagatgaaggccgtcatgttccagccttcatcagatttggtgttcatgtgcaggaaacacaccagatgcaccaaaatctgcaccactgccattgccaggatagatcccagaataacggccggagaggcagcgccggtcatcaccatccagaatggaataaccgtcaggatgaccgacaggataaagccggtcatgtacgtttttacgctgccgtgggatgcgccgccgctctcggtagaatgactcattacatcgcccccatcagataaacaacagtgaatacgcaaatccaaatcacatccaggaagtgccagaacaggctcagacacatgatgcgggtacggttagtgctggtcagaccgcgacgggcaacttgcaccatcagcaccgccatccagatcaaaccggaagtgacgtgcagaccgtgcgtgccgaccagcgcgaagaacgcagacaggaagccgctgcgatccgggcccataccgttaacaatcaggtgatggaattcatagagttccatcccgataaatccggcaccgaacaagaaggtcaacgccagccaggagataacctggctcttgttgttcttgtgcatagcgatcgccgccatgccgtaggtaatggagctaaataacagcaggaaggtttcaaccagaacgaacggcagttcgaaaatgtccttacctgtcgggccgccagcggtgccgttcaccagaacggcataggtagcaaacagaatagagaacagaatgcagtcgctcatcaggtagacccaaaatccgaagattttgttctggcctgcgtcatggtgcccgtgttcgtgcgcgtgggcagtcgcgtgcgttaaagtatcagttgccatttttcagccctgccttagtaatctcatcgaaatgctggttttccagtttttcgacttccgggaccggcacgtagtaatccacatcttcatcaaagctttttacaatccagctgatgatcatgcctgcgaaacccactatcgccagccaccagatatgccagatcatggcgaagccaaataccgtcgcgaaggcggcgataacaataccggcaccgctatttttcggcatatgaatctcttcatactgtccaggctgttggtacgcttcgcctttttctttcatttcccagaaggcgtcacgttcgtgaacgtgcggcacaacggcaaagttatagaacggcggcggagaagaggttgaccactccagcgtacggccaccccatgggtcgccggtcagatcgcggttctgatcgcggtcgcgaatagaaacgaagatctgaatcagttggcacaggatacccagcgcaatcagcgcggcgccggcggcggcaaccatcagcatcgtatggaactgcggatcaatttgctggctgaggcgacgggtcatgcccatgaagcccagtacgtacagcggcataaaggctacaaagaaaccgataatccagaaccagaaggcgcgtttaccccaggtttcgttcagcttgaagccaaacgccttcggccaccagtaggtcatacctgcgaagcagccaaacaccacgccgccgatgatcacgttatggaagtgcgcaatcaggaacagactgttgtgcaggacgaagtccgcgcccggtaccgccagcagaacgccggtcataccgccgaccgagaaggtcacgataaagccaatggtccacatcattgcggaatggaagacgatacggccctgatacatggtgaacaaccagttgaagatcttcaccccggtcgggatggcgataatcatggtggtgataccgaagaaggcgttaacgttcgcgcccgcgcccatcgtgaagaagtggtgcagccaaacgataaacgacagtacggtaatacagacggtcgcccaaaccagcgaggtatagccgaacagacgtttacgcgagaaggtcgctgcgatttcggagaataccccgaagaccggcagaatcagaatgtacacttccggatggccccaggcccaaatcaggttgatgtacatcatcatgttgccgcccatatcgttggtaaagaaatgggtgcccagatagcgatccagggtcagcaacgcgacggtaaccgtcagaatcgggaaagaggcgatgatcagtacgttggcgcacaaagaggcccaggtaaagaccggcatcttgaacattgtcatacccggcgcacgcatcttcaggatcgtcacgaagaagttgataccggttaacgtcgtaccaatacccgagagttgcaacgcccatatccagtaatcgaccccgacgctaggactgtactctattcccgatagcggcggataagccagccaccctgtctgcgcgaattcacccacgcccagcgagaggttaaccagaataacgccgacaacggtgaaccagaagctcaggttgttcaggaaagggaaagcaacgtcgcgcgcgccgatctgcagcggaaccaccaggttcatcagaccgataacgaagggcatcgccacgaagaagatcatgattacgccgtgagcggtaaagatctgatcgtagtggtgcggcggtagaaaacccgcttcgcctgcggaggcaagcgcctgctggctacgcatcatgatggcatcggcgaaaccacgtaacagcatcacaatcgcgacgatgatatacatgatgccgaggcgtttatggtcaaccgacgttaaccactctttccataggtaggtccacttaccgaagtaagtaatcgctgccagtatcgccagtcccccgacgataattgcagcgatcgttaccatgacgataggttcatggaacggtactgcatccagtgataattttccgaacatcttatcttcctcaacccttggagttggcggattccgcgtggctcatgtccataccttccattccttcatgcgagctgtgctcaccttcaggttgggtcatgtccatgctcttaccgtggcccatgaatttgttaataacgtccttgaacaaatcaggtttcacgctggagaaatattccaccttgttgtactcgcttggcatagccactttctcgaacgccgccatatcattcatggtgttcggagactgcttcgcttttgcgacccattggtcgaattctgcgcggtctttggtggcgatagctttaaacttcataccagagaagcccgggccgctatagctggcggagatgccatcgtaggttccgggttcgttggcgatcagatgcaaacgtgtttgcataccggccatggcataaatctggctacccagacgcgggataaagaaggagttcatcacggagttggaggtcactttgaaataaaccggcgtgttcgccgggaaggcgatctcgttgacggtggcgataccctgctccggatagatgaagaaccatttccagtccatggaaaccacttcgatggtgatcggtttttcgtcatgcgccagcggcttgcttggttcaagcgcgtgcgtggttttccaggtcagtacggcaaggaaaatgatgattaagataggcaccgtccagaccacggcttccactttattggagtgtgaccagttcgggctatacttcgcatccttattactcgcacgatacttccaggcgaaaccaacagccatcaagatggcgggaataacgacgatcaacatcaggccaaatgccgtcagtatcagcgaacgttgctccagtccaatctgtcctttgggatccagcagcgcagaattacagccactgagtaatgcagtgcctgcaattaatgacaaccatcccaaacttttattgtatttcctgagtctcatttaacgacctcaattccacgggacctggtggcgtttaaagtgtaggggcattttacggtaaggttacattactgtaaacatgattggttctgtgttaccaagttctgccgcgcatgtcacatatgttgccaagtatgtcgaaataactttaagacactgttgaaactttgcgttataacggatgaggtctgtaagtgggatgttgagggataattggtataaccaatgtaaaaataaaacaattacttaacaatttattatcaataaaaggacaatcaacggcagaaatttaaatttaatcggctgaatcgtgtaaagaaaataggtagcgtagaaattaccaataatttccaaaattctgttgcgcacaaaaagacaaatatattttttatcaattgatggttatttagccgttataattccgggtcgttattacaacggcaaataatgttttacagcaggcgtgtttttcgtagcgccaggtagtccagcaacccgccaaagacaatgccgcacacggcaaccactaccgcagtctcaagcaattcgggcaggaatgagaagttagtgtaatccaccgcgttcatggtcagcaggagtacccataccgccagcaaagcgacgcccgcgagcaggattgaaagcgcgaaattgtaggcgccacggtattgcgtgcggggaatgaaacgctcgctctgccagctatattccagcgtttgccgacagaccagcaacagtaacagcccgggaacggcggcgacaaccgagaagaggtagaatgtcggccagccgtgcgcttcaacgaaccagcccgctacaggaccaacataaacgcggcctactgcggagagggccgacagtagggcaaactgtgttgcggaaaacgacttattacatagcgtcattaataaggcgacaaaggcggcagtacccatcccgccgcacagattttcgaaaaagaccgccgcgcccatgctgaacatgtttttatcggtaatggagagcaaccagtaaccggcgttggacgcgccttgcaaaatgccgaaaatcagcagcgcgcgaaacagcgaaagacgctgcattaatatgccgccgtataacgcgccgacgatcgttgccaacaggcccagcgttttattgaccacgccaacttcaccagcgtcaaagccgacgccgcgaatcaaaaaggtggtggtcaggctcatagcgaaggcgtcccccagtttataaagcacaatgagcagtaaaatcagccaggcgttattacggccaaagaaatcgcgtagcggcgcgacgacggcctgttccagcgatttcggggacgggatagtatcggtcggttccggcgccagtaaggtggcgataatgcaggggatcaacaatgccgccatcagccagtacatgccctgccagccgagccagcgatcggccagccatagcgccagtccgccggaaaccagcatccccaaccggtagccaagcacgctgattgccgcgccagcgccgcgttcttctgcgggtaaaacatcggttttccaggcgtcgaacacgatatcctgcgaggcggagcaaaaagcaatcaccaccgccagcgccgccatccagcgtagctgcgtgccgggttcaagaaagcccatcgccgcaatcgccgccagtaacaacagttgggtggcgagtaaccaaccgcgacgacgacctaaaaaaggcggcgtgtagcggtccatcagcggggaccagagaaacttaaacacataggcctgaccaaccagcgagaagaagccaatcgttttaagatcgatattctcgacggtcatccacgcctgtagcgtaccggaggtgagcgccagcgggagaccggaggcaaaacccaatatcagcagaatggctgagcgcggttgctggaaaatacgtaaatattgacttgacataggcatctacagacccggcttctgccgggtcttgttgttgctattaacgggcgttttgcttgataaaatcgtgaatactggtgtcctgagacatatcagcaatggtatcggtcagaacgctattcactgcgtcggcaatattctggttagaggcctggaacgccccttcaatagagtagttggcgcgatagtttttggtcatcttgctgccatttgccgcggtcgcaataatcgcgatatccgctttggtcgcgatgttgtagcgcacgctgccctgggaaacatcagcatacagttggttaacaattatctgcagattaaccgcgccgttaggcccgatcatatagccccgcgccgtcatctgtttttccaggacttcttgtaacaggaagcgtaaatcgcgggaggcggttaacgttaccagctggttgttacgcgtgactttcgctaacgcttgatcctggcgttggtccgcgccggtaatgctaacggtgacgcccatcaggctcgggtcctgctgtggcaaggtgatcttcggcgcgacgtcaatggtcgtcggcggtgtggcgcatcctgccagcataaacagagcgactaacggaaagagaagtttttttaacatattcaggctctcaatgacgcttaaaacgtgataggtaaaaattcccgccatcataacaccgctaacggcgaggggaagtggtcaacgcaggtaaattcgtcgtaatgtccgatttggtattgataacggcgcgagcggggattttgagcgctaaaagaatgattaaggcagtaaacttcatacgtttggctgaaataatcagacgaaagctaaatttttgttgtcatgctgtaatggaaacggtaaaagcggctagtatttaaagggatgggtgacatcacagcgttgtcggaggagattttcatgatgatacgtgagcaaatagaagaaaaattaaggacagcgttcgaccccgtgtttctcgaagttgtggatgaaagctatcgtcacaatgttccagcaggatcggaaagccattttaaggtcgtgctggtgagcgatcgctttacaggcgaacgttttcttaatcgtcatcggatgatttacggtacgttaacggcggaactttccacaaccgtacatgcgctggcactgcatacttataccctcaaagagtgggaaggattgcaggatactatcttcgcgtcgcctccttgtcgcggcgcgggaagcatcgcgtagcaaaacggatttgcaactacctccgcttttccagtatgttgctacagaattatgtgaaaacggcctgcgggccgttttgttttgtctgaattttgagcgtgtcgtacagtattcagacaaaaattagccgagaattgtgaaaaccgccgcagcatcgcacaatcaccgttctcgactcacaaaagtgatgccgctataatgcgccgtcttatatatgaacgtcttcgggatgattctgacgacagggaatgtgattgattacgagaacatcccggttccgcgaagcaaatagcacgtgcttgcggagtagagttgaccgagcactgtgattttttgaggtaacaagatgcaagtttcagttgaaaccactcagggccttggccgccgtgtaacgattacaatcgctgctgacagcatcgagaccgctgtaaaaagcgagctggtcaacgtagcgaaaaaagtacgtattgacggcttccgtaaaggcaaagtaccgatgaatatcgtcgctcagcgttatggcgcttctgttcgccaggacgtgctgggcgatctgatgagccgcaacttcgttgacgcgatcatcaaagaaaaaattaacccggcaggcgcgccgaactatgttccgggcgaatacaaagtgggtgaagacttcacttactccgtcgagtttgaagtctatccggaagttgagctgaccggcctcgagtccatcgaagttgaaaagccggttgttgaagtcaccgacgctgacgttgatgtgatgctggacaccctgcgtaagcagcaggcgacctggaaagaaaaagacggcgctgctgatgcggaagaccgcgtgaccatcgacttcaccggctctgtagacggcgaagagttcgaaggcggcaaagcgaccgatttcgttctggcgatgggccagggtcgtatgattccgggctttgaagacggcgttaaaggccacaaagctggcgaagagttcactatcgacgtgaccttcccggaagagtaccacgctgaaaacctgaaaggtaaagcggctaagttcgttatcaacctgaagaaagttgaagaacgcgaactgccggaactgaccgaagaattcatcaaacgtttcggcgttgaagatggttccgtagccggtctgcgcgctgaagtacgtaaaaacatggaacgcgagctgaaaggcgcggtgcgtaaccgcgttaagtctcaggcgatcgaaggtctggtaaaagctaacgacatcgacgtaccgtctgcgctgatcgacagcgaaatcgacgttctgcgtcgtcaggctgcgcagcgttttggtggtaacgagaaacaggctctggagctgccgcgcgaactgttcgaagaacaggctaagcgtcgtgtagttgtcggtctgctgctcggcgaagtcattcgtaccaacgagctgaaagcggacgaagaacgcgttaaaggcctgatcgaagagatggcgtctgcttacgaagatccgaaagaagtgattgagttctacagcaaaaataaagagctgatggacaatatgcgtaacgtcgctctggaagaacaggctgttgaagcggttctggcaaaagcgaaagtgtctgaaaaagccacttccttcaatgagctgatgaaccagcaggcgtaatttttcgcgttaaaagcacgaaatttgcacaaaaacccgtcacctttcagtgacgggttttttttgtcacgtattttgcatggtaagggtgcgaaaaccgcgtttcagtgttagcgttagagcaaaagattgttatacttgaattatggcgatgccgtacccattacagagggactggctgataatccgtccatcaggttacaatcagtacagcagattttttcaatttttatccaggagacggaaatgtcatacagcggagaacgagataatttggcccctcatatggcgctggtgccgatggtcattgaacagacctcacgcggtgagcgctcttttgatatctattctcgtctacttaaggaacgcgtcatatttctgaccggccaggtcgaagaccatatggctaacctgatcgtggcgcagatgctgttcctggaagcggaaaacccggaaaaagatatctatctgtacattaattctcctggcggcgtaattactgcggggatgtccatctatgacaccatgcagtttattaagccagacgtcagcaccatttgtatgggacaggcggcctctatgggggcgtttctgctgactgccggggcgaaaggcaaacgtttctgcttgccgaactctcgcgtcatgatccaccagccgctgggcggctaccagggccaggcgacggatattgaaattcacgcccgcgaaattttgaaagtaaaagggcgcatgaatgaacttatggcgcatcatacgggtcaatctcttgagcagattgaacgtgatactgagcgcgatcgcttcctctccgcgcctgaagcggtagagtacggtttggttgactcaattttgacccatcgtaattgatgccctggacgcaagtgtgccgctatacacttcatccttcacgctacctcggtgttggctgccagcgcgcctcccagtgacttacttatgtaagcgcctgcagagtcgacgagttgccgccttgatgtagctcgaatgattttgtgtatatactaatgaagggcggcacaacgctgattagcggcttgcgcctgagaatggcatttgcgtcgtcgtgtgcggcacaaagaacaaagaagaggttttgactcatgacagataaacgcaaagatggctcgggcaaattgttgtactgctctttttgcggcaaaagccagcatgaagtgcgcaagctgattgccggtccatccgtgtatatctgcgacgaatgcgtcgatttatgtaacgacattattcgcgaagaaattaaagaagttgctccgcaccgtgaacgtagtgcgctgccgacgccgcatgaaattcgtacccacctggacgattacgttatcggccaggagcaggcgaaaaaagtgctggcggtggcggtctataaccactacaagcgtctgcgtaacggcgataccagcaatggcgtcgagttaggtaaaagcaacattctgctgattggaccgaccggttccggtaaaacgctgctggcggaaacgctggcgcgcttgctggatgtgccgttcactatggcggatgcgaccacgctaaccgaagcgggttacgttggtgaagacgtcgagaatatcattcagaaactgttgcagaaatgcgactacgacgtgcaaaaagcgcagcgtgggattgtctacattgatgaaatcgataagatttcgcgtaaatcagacaatccgtccattacccgcgatgtttccggcgaaggcgtacagcaggcgttgctgaaactgatcgaaggcaccgtcgccgcggttccaccgcagggcggtcgcaaacatccgcagcaggagttcttacaggtagatacctctaagattctgtttatctgcggcggcgcgtttgccggtctggataaagtgatcgctaaccgtgttgaaaccggctccggcattggttttggcgcgacggtgaaagcgaagtccgacaaagccagcgaaggcgagctgttgtcgcaggttgaaccggaagatttgatcaaatttggtctgattcctgagtttatcggtcgtctgccagtggtagcgacgctgaatgaactcagcgaagaagcgctgattcaaatcctgaaagagccgaaaaatgcgctgaccaagcagtatcaggcgctgtttaacctggaaggcgtcgatctggaattccgtgacgaagcgctggacgctatcgccaggaaagcaatggcgcgtaaaaccggcgcccgtggcctgcgttctatcgtcgaagcggcgctgctggataccatgtacgatttgccatctatggaagacgtcgaaaaagtggtgatcgacgagtccgttattgccggtcagagtaagccgttgctgatttacggcaaaccggaagcgcaggcttctggcgaataattaaacattcatacaatcagttagccaaaaaaggggggattttatctcccctttcgtttttcctgtaaacacgccgttgaatgtgtgggaaacatccccatatactgacgtacatgttataggtggtatggagcacagctatactatctgattacctggcggacactaaactaagagagagctctatgaatcctgagcgttctgaacgcattgaaatccccgtattgcccttgcgcgatgtggtggtttatccgcacatggtcatacccttatttgtagggcgggaaaaatctatccgttgtctggaagcggctatggaccatgataaaaaaatcatgctggtcgcccagaaggaagcatcgacggatgagccgggtgtaaacgatcttttcaccgtcgggaccgtggcctctattttgcagatgctgaaactgcctgacggcaccgtaaaagtgctggtcgaggggttacagcgcgcgcgtatttccgcgctgtctgacaacggcgaacatttctccgcgaaggcggagtaccttgattcgccagccattgatgagcgtgaacaagaagtgctggtgcgtaccgctatcagccagttcgaaggctacatcaagctgaacaaaaaaattccgccggaagtgctgacgtcactcaatagcattgacgaccctgcacgtctggctgacaccatcgccgcgcatatgccgctgaaactggcggataaacagtccgtactggagatgtccgacgttaacgaacgtctggaatatctgatggcgatgatggaatctgaaatcgatctgctgcaggttgagaaacgcattcgcaaccgcgtgaaaaagcagatggagaaatcccagcgcgagtactatctgaacgagcaaatgaaagcgattcagaaagagcttggcgagatggacgacgcgccggacgaaaacgaagcgctgaagcgtaagatcgacgcggcgaaaatgccgaaagaggcgaaagagaaagcggaagcggaactgcagaagctgaaaatgatgtctccgatgtcggcggaagcgaccgtggtgcgcggctacatcgactggatggtgcaggtgccgtggaatgcgcgtagcaaggtcaaaaaagacctgcgtcaggcgcaggaaatcctcgatactgaccattatggtctggagcgcgtgaaagaccgcatccttgagtatctcgcggttcaaagccgtgtaaataaaatcaaggggccgatcctgtgtctggtggggccgccgggggtaggtaaaacctcgttgggccagtccatcgctaaagcaacagggcgtaaatacatccgtatggcgctgggcggcgtgcgtgatgaagcggaaatccgcggtcatcgccggacttacattggctctatgccgggtaaactgatccaaaaaatggccaaagtgggggttaaaaacccactgttcctgctcgatgagatcgacaaaatgtcttctgacatgcgcggcgatccggcttccgcactgctggaagtgctggatccggagcagaacgtggcgttcagcgatcattacctggaagtggattacgatctcagcgatgtgatgttcgtcgccacttccaactccatgaacattccggcgccgctgctggatcgtatggaagtgatccgtctgtccggttataccgaagacgagaagctgaatattgctaaacgtcacctgctgccgaagcagatcgagcgtaacgcgctgaagaaaggcgaactgacggtcgacgatagcgcgattatcggtattatccgctattacacgcgtgaagcgggcgtgcgtagtctggagcgtgaaatctccaaactgtgccgcaaagcggttaaacaactgttgctcgataagtcgttaaaacatatcgaaattaacggcgataatctgcacgactacctcggtgtgcagcgctttgattatggccgcgcggatagcgaaaaccgcgtaggtcaggtgacggggctggcgtggacggaagtgggcggcgatctgttgaccatcgaaaccgcctgcgtcccgggcaaaggcaagttgacctacaccggctcgctcggtgaagtgatgcaggaatccattcaggcggcgctgaccgtggtgcgtgcgcgcgcggaaaaactgggtattaatccggacttttacgaaaaacgcgatatccacgttcacgtgccggaaggcgcaacgccgaaagacggtccaagcgccggtatcgcgatgtgtaccgcgctggtttcctgcctgaccggtaatccggtgcgcgcagatgtggcaatgaccggtgagatcacgctgcgtggtcaggtgttgccgatcggcggcctgaaagaaaaactgttggcggcgcatcgcggcgggattaaaacggtcttaattccgttcgaaaataaacgtgacctggaggaaattccggacaacgtgattgccgatctggatattcatcctgtgaagcgcattgaggaagttctgacgcttgctctgcaaaacgaaccgtctggaatgcaggttgtaaccgcaaaatagtgacctcgcgcaaatagcgctaataaaaacagggctggcaggctatttcggacttgccagcctttttttgtatagctaatttagatggttgattgggtctgccaccattaacgggtgttgtaagggcgtggcaggcctgatataactgctgcgcggtcgtacttcgaaggattcaggtgcgatataaattataaagaggaagagaagagtgaataaatctcaactgatcgaaaaaattgctgcaggggctgatatctctaaggctgcggctggacgtgcgttagatgcgattattgcttctgttaccgaatctctgaaagaaggggatgacgttgcactggtaggctttggtacttttgctgttaaagagcgtgctgcccgtactggtcgcaacccgcaaacaggtaaagagatcaccatcgccgctgccaaagtgccgagtttccgtgcaggtaaagcgctgaaagacgcggtaaactaagcgtgatcccctcgggggatgtgacaaagtacaagggcgcatcaactgatgtgccttttttattggcgattcgggactttctgtgcgttgcgggctgacaattgccctcgtttcttgtcacaataggcttttgtgcgccgcgttcagaaaatgcgatgcgcgtgaagtctctatacgcaaatcattcaggttgcgtcgacgcggcgactgagcgaatcactcggtagccagcggagaagccgcctgaaagataaagtgtaaagtcacctacagcggagtgtggttacaccatgatggacagcttacgcacggctgcaaacagtctcgtgctcaagattattttcgttatcattatcgtgtcgttcattttgaccggcgttagtggttacctgattggcggaagcaataactacgccgcaaaagtgaatggccaggaaatcagccgggcacagtttgagaatgcgtttaacaacgaacgtaaccgtatgcagcagcagttgggcgacaggtattctgaactggcggccaacgaaggttatatgaaaagcctgcgccagcaggtgctgaatcgtctgatagatgaagcgctgttggatcaatattcccgcgaactgaaactgggcatcagcgatgagcaggtaaagcaggcgattttcgccactcccgcttttcaggtggacggtaagtttgacaacaaccgctataacgcgattgtgaatcagatgggaatgaccgccgatcagtacgctcaggcgctgcgtaaccagcttaccactcagcaactgatcaacggcgtggccggtactgattttatgctgaaaggggaaaccgacgaactggcggcattagtctctcaacagcgcgtggtgcgtgaagccgttattgatgtcaacgcgctggcggcgaagcagcaggtgaccgatcaggaagtgtccagctactacgatcagaataaagtccgctttatgacgccggaacagttccgcgtaagctatatcaagctggatgccgcgacgatgcaggcaccggtcagcgatgcggatattcaggcctattatgaccagcatgtagatcagtttactcagccggagcgtattcgttacagcattattcagaccaaaacggaagatgatgcgaaagcggtactggatgcgctgaacaagggcgaagatttcgccacgctggcgaaagagaaatctaccgatatcatctctgcgcgtaatggcggcgatatgggctggctggaagagtctgccacggtgccggaactgaaaaacgccggattaaaagaaaaaggccagatatctggcgtgattaagtcgtctgtcggttttctggtggcgcgtctggatgatattcagcctgccaaagtgaaaccgttaagcgaggttcgcgacgacattgccgcgaaagtgaaacaagaaaaagcgctggatgcttactatgcgttgcagcagaaagtgagcgatgcggcaagcaacgacaatgagtcgttagcaggcgctgaacaggtcgctggcgtaaaagccgttgaaaccggctggtttagccgtgacaccttaccggaagagctgaacttcaaaccggtagccgatgctatctttaatggcggtctggtgggcgaaaacggtacgccggggccgaattcagacattatcaccgtggatggtgaccgggcttttgtcgtacgcgtgagcgaacataaacctgaagccgtgaagccgttggcagaagtgaaagaacaggtcactgccctggtgaagcataataaagcggaacaacaggcgaagctggatgcggagaaactgctggtcgagctgaaagcgggcaaaggcgcggaagcgatgaaagcggcggggctgagttttggcgagcctaaaacgttaagtcgtaccagtcaggatccggtgagtcaggcggcctttgcgttaagccttccgacgaaagataagccagtttatggcgtggcgaacgatatgcagggtaacgtcgttctgctggcgtttgacgaggtgaaagcgggcgccatgccggaagcgcagaaaaaagcgatggtgcagggcatcacgcagaacaatgcgcaaattgtctttgaggcgctgatgagcaatctgcgtaaagaggcgaaaatcaaaatcggcgacgctctggaacagcagtaatcgtcgaggcgcttcgcaaaaaattgcaaaacgttgtatcccacaaaggccgctttcgcggccttttccatttctgagaattgccgtttgttcgtttttctccgccccgctatcgtggctgcactgttaacaaacaaggagaaaacagtatgaaacacggaattaaagcactgcttattacgctttctttaacctgcgcgggcatggcccatagcgcgctggcggcgacgcctgtcgcaaaaaatgcagcggtggaaacaaaagcggatacgccttcttcatcctccgccaaagcggcattacctgctaaagccagcgatgatgaaggtaccagggtgagcattaataccgcgtctgcggaggatctggcgcgggtgatgaacggcgttgggctgaaaaaagcgcaggctattgtgagctatcgggaggagtatggtccttttaaaacggtggatgatttaaagcaggtgccgggaatgggaagcgcgctggtggagcgtaatctggcagttttaacattgtaatcacttgcacagtggccaaaatttgccagactgtagaggtcataccagttatgacctctgtacttgtcgtttacttataacaacaacgtaaggttattgcgctatgcaaacacaaatcaaagttcgtggatatcatcttgatgtttatcaacatgttaataatgcccgctatctggagtttctggaagaagcccgttgggatggtctggaaaacagcgacagctttcagtggatgacggcccgcaatattgcctttgtggtggtaaacatcaatataaattaccgtcgcccggcggtattgagcgatctattgaccgtgaccagccaggtacaacagcttaacggtaaaagcggcgtattaagccagacgattacgctggagccagaagggcaggtggtggccgatgcgctcatcacgtttgtttgtattgatttaaaaacgcaaaaagcgctgccgctggaaggcgaattgcgtgaaaagctggaacagatggtgcaataacgcttcgcagtctgatggcgttgaacttgtccggcctggagatattgaccatggtgaatatctccaggccggataaggtgcgtgcgccgccatccggcaaaacaatcaccttaacccggttttttgcttcattgctgccatcaccgccgctttattcgacagataatgattcaggccgttagcgcgcagattacaggctgcgcaatgaccacagccatcgcctttaatgccgttatagcaggtcagcgtctcttcgcgaaccaaatccagttggccccaataatcggccagcgcccaggtttcagctttatcaatccacattaagggcgtttcgaaacggatatctttcgccatgcccagattcaccgcgtgattcagcgctttgacgaactcatcgcgacagtctggatagccggaaaaatcggtctcgcaaacgccagtgatcaccgcttcggctttaacctgataagcgtaaatcgccgccagcgtcagaaagagaatattgcgtcccggtacgaaagtattggggataccgtcagcgttcggttcatagtccggcaccggaatgctatcccgcgtcaggctgctgaccgccagttcgttcagcaaagtgacatccagcactttatgcgcgcgtgcgccaagttttaacgccagcgcccgcgcgacatcaatctctgcgcggtggcgctgaccataatcaaacgtgacacaatgcacttcatcatactgatgccgcgcttgcgccagacaagtggtggagtcctgacctccactaaatacaacaacggcgcgtttcatagttatcctgatcaatgacgaaagccaatatggtaacgcgtacggataatcccgaccagcttcttcacggcgaaggcggcggaagccaggcttcgctaaattcaaaccagccgcgaggggtgagtcgaacgccgttaacgcccggtggggcgctgatgcgatagtgataattaaatagtggcgtaagtgtggcgtcatccatcaggttagcaaaaacttgttgtagcgcggcgcggcgatctttttcattgggctgaatttgcagagcgtcaagcgtagcctgcagatgggaaaacgcaggcgcgtccaggacatgtgaccagatctgatcgcaacgtagccactgctccagcgtatattccggcgcttcgccgatcagcctgtcgcccatcatcagatccgcttgcgccaacgcagggcagttatcccagtttttggcattatgaaaaatcaacgttaactcacagccgagcgtcgccaggtaatgtcgaagctgttccgccatcgtatgcagctctacgggaaggtgatacgccagggtaagttttttcggcaatggcgtttcatcaacgtcctgccattgcgggattgtccagccgggtagcagcccctgacttggcataatcaagttctcatctaccggtaaggttttcagcagcgaagtatgatggataatatgtatcagacgccgcgcctgctgtacgttgagccgtgagccctttttgagggttaaataacaaaagccaagactgataccactacttacctgactcagcgtcgccagctcttccggtttgccgatggcaatctgcaccggatggcggcaactggtgcccagatcctgggcaaacagttgcggggtgatccagaattcaatcgctttcagcagcggatggctgaggtgataatggtcatgactttccagacgcaccagttccggcgtgaacaacgccaggcgaaaaggaccggtgccgataagcggcaggtcaggatgcgccagaccgctacaatagctcgccagacgatgcgccagccagtaatcaggtcggtgaaggagaaaggtcaggcactgaggatgcgttacttcgatccgtgcgacgctaataaacaatttgcttagcgcgggtagggtaagcagcctttccaggcgttcgtgtagctgcgcggtatccaccgcatcgccattatgccagtgcagcgtggagcgaatataaaaatcccagcgtaaaccgtcggcggaaacctcccagtgatgcgccaaatccccgcaaggatattgactgtcgcggtcgaagcgcgttaacccggaaaaaacttgccctgcgagatgctgttccgcgcggcctggcaggaaacccggctgcagcggatcaagcggacgatagtagggaatacgcaatgtcggcgtatcgttttgccattggccgcccataaaaggctggagcatcgcccgtaactcgcccggcgccagctgcgccagttccagtacgttgagctgctgccctttttccagcgcctgttccatcatggcggtgcggagcgattccggcgtgaccagaaactggagccgtccacgtttcccgcgcccggactgcgcctcccatcttagccaacctgcctgctgggcctgacgcagcagcgttcgcagatggcgctcgctacaaaaacagcgttcggccagttcgctaacggtgacatgttgcgtttccccggcggaaggctgccagaggcgttgatattgattaagccgattcagtagcctcatagaaacccggaacacttccttttatctgttcactattacttccgtatatctcaggtaatactgaacaacaagttaaccgcgtcacagtgtggagaaagagatggcccgtctggcagcatttgatatggatggcacgttattaatgcccgatcaccatttgggtagagaaacgatcgccacgctggcgcgtctgcgcgaacgcgatatcaccctgacattcgctacgggtcgtcatgtgctggaaatgcggcatattctggggacgctttcactggatgcttatcttattaccggtaacgggacgcgaattcactcgctggaaggcgacgtgctgcatcgtcaggatctcgatcctcaggttgccgatacggtgatgcaccatgcctgggatacccgagccagtatgcatgtgtttaatgacaacggctggtttacaggccaggagatccccgcgctactccaggcgcacgtctacagcggctttcgttatcaggttatcgatataaaaagcattccggcccatcaggtgacgaagatctgtttttgcggcgatcatgacgatctgatccgtttgcgcattcagctcaatgaggcgctggaagaacgcgcgcacctctgtttctctgccgtcgactgcctggaagtgctaccgctggggtgcaataaaggatcggcgctggcggtattgagcaaccatttagggctttcactggcagattgcatggcgtttggcgacgcgatgaacgatcgggaaatgctgggcagcgtcgggcgggggctcattatgggcaatgccatgccgcagcttatcgccgcgctgccacacctttcggttatcggacattgtggtaatcaagcggtatcacactttttgacgcattggctggacaatccgcatctaccttattcccccgaatgagagatctcttccagcaagccagacattcagtctggcttttttttggtttctagtcgccggtaagtaattttgcgatggccgctgaccacggcgtcaaatcgccgatatggtcgctaacccaggccggatggtaataggtatccagatagcgatcgccgctatcgcacaataacgtcacgatagcgccggtttctccagcctcgcgcatccgggccgcaagctgcagagctccccacatattcgtgccggtagaggcgccgactttacggcctagctgcgtttccagccagtgtgcggtggcaacgctggcggcgtccggcacgcgcagcatctcatccacgacatccggaataaaagaaggctctactcgcggacgaccaattccttcaattttactgcctaccgggctgcgtaatgaagcgtcgcgatcctgccagtaaggtaaaaagacggaattttccggatccaccaccatgagctgagtatcatagccctggcagcgaatatagcgcccaatcgtcgcagaggttccgcccgttccggcgctcatgacgataaatcgcggtaccggatggagttcgttgcgcatctggcggaaaatactgtcggcaatattattgttgccccgccagtcggtagctcgttctgcgtaggtaaactggtccatatagtgaccgttcagttcatgcgccagccgctcggaggcggcataaatttcgcaggcgctctccacaaaatgacagtggccgccgtaaaattgaatctgttcgattttacgttttgcggtacaggcgggcatgacggcgatgaacggcagtcccagtaaacgcgcgaaccaggcttcggaaatcgccgttgagcctgatgacgcttcaataatcggagtgccttctttaatccagccattgcacaacccataaaggaacagcgagcgcgccagacgatgcttgaggctaccggtgggatgcgtgctttcgtctttcaggtaaagctggatacctggaaatgccgacaggggcaaacgaataagatgcgtatccgccgagcgctggtggtcagcgttaatttcattaatggcatttttaacccaattgctactcatcattaatatccatttatcattttgtgccaagagtagcgaaaagtacggaaaaaattgttgctatttgacctttaaattacaatgtaaggagaaaaatattctctatggagtgggtatgttagataaaattgaccgtaagctgctttgcttattgcagcaggattgtaccctctctttgcaggcgctggcggatgccgttaatctgacgacaacgccttgctggaagcggcttaaacgcctggaagatgacggtatcctgcttggcagggtcgcgctgctggacccggaaaaactggggctgggattaaccgctttcgtgttgataaaaacgcagcaccacagcagtgaatggtactgtcggttcgtgaccgtcgtctctgagatgccggaagtgcttggcttctggcggatggcgggggaatacgactatctgatgcgagttcaggtggccgacatgaagcggtatgacgacttctataaacgtctggtcaatagcgtcccaggactgtcagacgtcacctccagttttgcgatggaacagattaagtacaccacctctctgcccattgaataattctcccggtattgccggaaatcatatcaggaaataacgcgtgcgattatttgctcaattaagctggtactttcgccgggaatggcgtcgctatcttggcgcagtggccctgcttatgcttattgcgatgctacagctaatcccgcccaaagtggtggggattgtcgtggatggcgtaaccgcacagcagtttactccaggccgaatagcgatgtggattggcaccattgccctgatcgccgtagtggtctatttgttgcgctatgtctggcgcgtgctgctatttggcgcctcttatcaattagccgttgaactgcgtgaagattattatcgccagttgagtcgtcagcatcctgaattttatcagcgccatcggacgggcgatcttatcgcgcgtgcgacgaatgatgtggatcgcgtcgtatttgcagcgggcgagggcgttctgacgctggttgactcgctggtaatgggctgtgcggtactgattgtcatgtcgacgcaaattagctggcagctaacgctattagcgctgttgccgatgccgattatggcgctgatgatcaaacgttacggcgatcggctgcatgattatttcaaactggcgcaggccgccttctccagcctgaacgaccgcacgcaggagagtctgaccagcatccgcatgatcaaagcgtttggtctggaggaccgccagtcttcgctgtttgcggcggatgccgaagataccggcaagaaaaatatgcgcgtggcgcgtattgacgcgcgttttgatccaaccatttacatcgccattggcatggcgaacctgctcgcgattagcggcggaagctggatggtggttaacggcagcctgacgctgggcgaactcaccagctttatgatgtatctggggttgatgatttggccgatgctggcgctggcctggatgtttaatatcgtggagcggggtagcgccgcatacagccgcatccgcgccatgctggcggaagcgccggtagttaaggatggcgaagagccggtcccggcggggcgcggcgaactgacggcggccattcgtgagttttgctatccgcaaacgacgcatccggcgctggagaatgtgaactttcgtcttaaaccgggtcagatgctggggatatgcggtccgaccggcgcggggaaaagcacaatattgtcgcttatccagcgccattttgatgtgacgcagggagagatccgattccatgacatgccgttgacgcatctgcaactggatagctggcgtagccgactggcggttgtcagccagacgccgtttttgttctcggactctattgcgaataatattgcgctcggacgcccggaggcgactcaggaggagattgaacaggtggcgcgtttagccagcgtacatgaggatattctccgcttgcctcagggctacgacacgcaggtaggtgaacgtggcgtcatgttatcgggagggcaaaaacagcgtatctcgattgccagagcgctactgttaaatgcggaaattctgcttctcgatgatgcgctttctgcagtagatggccgcacggagcatcagattttgcataatttgcgccagtggggcgaagggcgtacggtcatcatcagcgcgcatcgtttatccgcgctgaccgacgccaatgaaattatcgttatgcaacatggtcatgttgttcagcgcggcgatcacgatcaactggcgcagcagattggctggtatcgcgatatgtatcgctatcagcaactggaggccgcgctggatgacgcgccggaacgcggcgaggaggcggtgaatgcgtagttttggacagctatggccgacgctgaaacggttgctggcgtatggctcgccatggcgaaaaccgctctctgtcgcggtgatgatgctgtggattgcggcggcggcggaggttagcggtccgctgctgatcagctatttcattgataacatggtggcccgccaccatttaccgttgggcaaggtcgcggggctggcggccgcctatgtggggctacaatttctggcggcgggtctgcattacgcccagtctttattatttaaccgggcggccgttggcgtggttcagtccttgcgcacggacgtcatggatgccgccttgcgccagccgctaagcgccttcgacacgcagcctgtcggacaattaatttcacgcgtgaccaacgatacggaagtcatccgcgatctgtacgtcacggtcgtcgcaacggtattacgtagcgcggcgttgatcggcgccatgctggtcgctatgttcagccttgactggcggatggcgctggtggcgattttgatttttccggcggtattgaccgtgatgatcatttatcagcgctacagcacgccgattgtacgccgcgtgcgggcatacctggcggatattaacgacggctttaacgaaatcatcaatgggatgagcgtaatccagcagtttcgccagcaggcgcgcttcggcgaacgcatgggcgaggccagccgctcgcactacatggcgcggatgcagacgctgcgcttggatggctttttattgcgtccgctgcttagcctcttttccgcgctcattttatgcggtttgttgatgcttttcagctttacgtctgccggcacgattgaggtcggggtgctgtatgcgttcattagctatttgtcacgtctgaacgagccgctcattgaactgaccacccagcaatccatgctacagcaggcggttgtggcgggagaacgtgtttttgaactgatggatcgcccgcgccagcgctatggcagcgacgacaggccgttacaaagcggggcgattgatattgatcatctgtcgtttgcttaccgcgacgataatcttgttttacaggacattacgctatcagtaccgtcccgtagctttgtggcgctggtggggcacaccggcagcgggaagagcacgctcgccagcttattaatggggtattaccccctgacacaaggcgaaattcggctggatgggcgagaaatcgcctctcttaatcatcgcgttttacgccagggcgtggcgatggttcaacaggacccggtagtgatggcggatacctttctggctaatgtgacgctggggcgcgatgtctccgaggcgcaggtgtggcaggcgctggaaacggtacaactggcagatctggcgcgcggcctgagcgacgggctgcatacgcatctcggcgagcagggaaatacgctgtccgtcgggcaaaaacagctattggcgctggcgcgcgtgctggttgacgccccgcaaatattaattcttgatgaagcgacggccagcatcgattccggcactgagcaggcgatacagcaggcgctggcggcgattcgcgagcgcaccacgctggtggttattgcccatcggctatcgacaatcgtggaggcggataccattctggttctccatcgcggccaggcggtggagcgcgggacgcatcaacaattgctggcggcacaaggacgctactggcaaatgtatcaattacagttagttggcgaggagttagccgccagcgtacacgaagaacccggccctgcggcgtaaggtttggcgccacagggcaaaacctcgcccatcatgcaccgtcgtggtgcgtttttctttccctgtttcgattttggggcgcgtcaatataaagacgcgccgctaaccgcgcttttcctcgctcgccagcttctggcacatcctttgcaatatccattcagaagagtccatgcgcggcggcagccgttacctaattctgactggagggttctatgaagctggttaccgtgattatcaaaccgttcaagctggaggacgtgcgggaggcgctttcttccattggcattcagggactgaccgtcaccgaagtgaaagggtttggccgtcagaaaggacacgccgaactgtatcgcggcgcggagtacagcgtgaatttcctgccgaaggtcaaaattgatgtggctatcgccgacgaccaactggaagaggtgatcgatatcatcagtaaagcggcttacaccggaaaaattggcgacggcaaaattttcgtcgcggagctcatgcgcgttattcggattcgtaccggcgaagctgacgaagcagcgctgtaagacccgccacacagcaacaggaaatgaaaaaatgaagatagcgatgataaaaaccacactggcttcactggcgctgctgcctgggctaacgatagccgcgccggcggttgccgataaagcggatagtgcttttatgatgatttgcaccgcgctggtgctgttcatgacgataccgggtatcgcgctgttttacggcggattaattcgcgccaagaacgtgctgtcaatgttaacgcaagtgaccgtcacctttgcgctggtctgtattttatgggtggtgtacggctattcgctggcttttggcgaagggaatcattttttcggtaatgccgatggggcgatgttgaagaatatcgcgttgacggcggtaacgggtacgatttatcagtatattcatgtcgcgtttcagggatctttcgcctgtattaccgtcgggctgattgtcggcgcgctggcggagcgtattcgtttttcggcggtactgatttttgtcgtggtgtggttcacgctctcttatatcccgattgcgcacatggtgtggggcggcggcctgctggctgctcacggcgcgctggattttgctggtggtacagtggtgcatattaacgccgctatcgctgggctggtgggggcttatttaattggcaaacgcgtcggctttgggaaggaagcatttaaaccccataacctgccgatggtctttaccggtactgcgattctgtatatcggctggtttggatttaacgcgggttctgccggtagcgcaaacgagatagcagcgctggcctttgtgaacaccgtggtggcgaccgccgccgcgattctggggtggattatcggcgagtggacgctacgcggtaagccttccctgctgggagcgtgttccggcgcgattgccggtctggtcggcgtgacgccagcctgtggctatgttggcgttggcggcgcgctggttatcggcgttattgcgggtctggcgggattgtggggagtcaccatgcttaaacgtctgctacgggtagatgatccgtgcgacgtatttggcgttcacggcgtttgcggaatagtcggctgtatcctgaccggcgtttttgccgccagttcgctgggcggcgttggctttgtcgacggcgttacgatgggacatcaggtgatggtacagctggaaagtattgctattacggtcgtctggtccggcgttgtcgcgtttgttggttacaaactggcggatatccttgttggactgcgtgtaccggaagagcaggagcgcgaggggctggatgtgaacagtcacggcgagaatgcgtataacgcgtgattgcgcaacatgcctgatggcgctgcgcttatccagtttaccgtaggccggataagcgcagcgtcatcaggccattaacgccgcatagcggcatgttttttaattgtgattgcgcattaccccttcctgcacggttgaagcgaccagcgcgccatcctgagtataaaactcgccgcgaacaaagccccgggcgctggaggcggaagtgctctccacgctataaagtagccattcattaaaattgaacgggcgatggaaccacatagagtgatcgatagtggcgatctgaatgcccttttccagaaaaccgatgccgtgaggctgaagcgcgacgggaaggaaattcaggtcagaggcatatcccagtaaatattgatggacgcgaatgtcatccggaacggtgccgttggcgcgaatccatacctgacgcacaggcgcggcgacgtgacctttcaacggattgtgaaattcgacgggacgaatttccagcgggcgatcgcagagaaacttttctttcagaatcggcggcagtaaatgcgccagcgattgcgcgatttccgtttctgacggtagtccttccggcccgactaccgtcggcatggttttttgatgttcaaaacccggttccggcgcctggaatgaggcggtcatgtaaaagatgggtttcccgttctgaatagcggcaacgcggcgggcgctgaagctattcccatcgcgcagcacttctacgtcatagataatgggtttttggctgtcgcctggccgcagaaaataactgtggaatgaatgcaccagtcgcgcttccggcaccgtttctttggcggcatagagcgcctggcccaccacctgaccgccaaatacctggcgcagccctaagtcttcactttggccccgaaagagtccttcttcaattttttccagattcaataatgtcagcaaattattcagtgtctgactcatacatactctccaggtgacaacgatgccgaagcgaggtagggcagagtataacgcaattttgcaagtggtccgatgggtacaaaagtctgaataacagaccaattccaggcaaaaatgagtgacatgtgccacacttaatcacgttatgtttctgttaaccactcttccggcggggggaaaggcctgctggtgcattgatgataaggagaattgaatgaaactcgtgcacatcgtaagtggtttagcggttgcgatatctctggcggcctgcgctgataaaagcgctgatatccagacgcctgcgccaaaccctaacatgtcgattacagctaaccagtctactattcagcaacccaatgtttccggtaccgtctggatccgccagaaggtcgctctgccgccagatgcggtgctgaccgtgacgctttcagatgcttcgctggctgatgcgccgtctaaggtgctgtcgcaaaaagcggtacgtaccgaaggtaaacaggcgcctttcagttttgtgttgccgtttaacccatcagatattcaacctaacgcgcgcatcctcctgagcgcggccatcaccgttgataataagctggtatttattaccgatagcgtgaaaccggtgattaataatggcggcactaaagcggatctgacgctggtaccggtacagcaaacggcggtgcctgtgcaggccagcggtggtgcgacgacgacggttccatcgacttcgccgacccaggtcaattcgtcttctgccgttcctgcgcctacccagtattaatcctgcgccaaccctctccgttacggagagggttaatacacccagcgatagcgttgtaaatcgatttgtccgcttcccgacaccaccacgccttccgccagtaatgcctgacgttgccgctgtagatccggcccggtaagtgatattgcgccgtggcggttcaccacccgatgccatggtaaagtgctgccttccggcagacgttttaaaactccgccgacctgacgcgccgcccgaggcgaaccggcaagccgggcgacatcgccgtaggtcgtgacaaacccttccgggatcgaggcgacgatttgccagacgcgttgaggaaatgtgtcctgaatatccataatagaatcctgcgttaatgcttcaggataatctggaataaggggggaggaaagcccggatgcgcaagaaaccagcatccgatgcctgatgggttgcaattgcacgatatagcagtgataatgcgcctgcgcgttggttcacaacgctctcaatgggggctctgttggttctcccgcaacgctactctgtttaccaggtcaggtccggaaggaagcagccaaggcagatgacgcgtgtgccgggatgtagctggcagggcccccacccatttgtgcctctccacactgttcttttctgctgtgcgacgttatagccgctgttccgcccaaagaataaatgccgtagcgggtaggggtttactgtataaccagccctgaccataatgtacgccatgctggcgtagccactgttcttgcctggccgtttcgatgccttctgcgaccatcttaagtttgagcgttttcgccatttcaataatatgcggcgtgacgtttttatattccagcgcatcgacaaaagatttatcaattttaaggacatccacatccagattttgtaagtagctgaggctggaatagccggtgccaaagtcatcaatataaattgaatgtcccgcgttacggtatctggcgacaatgggcgcgctggttttcggatcggcgaactcgcgttccgttaactcaagcgcgatttgcgacggagaaatttggctacggttcagcagcgtgcttaacagcgtcggcaacgtttccgacgccagatcggatgcctcaagattgattgaaatatgttgttcgggatgggactttaaccaactccccatgtcttcaaaaacggtgtcgatgattagccgggttagcggctccgtgagcccggtttgttcagccagcgcgataaaaatttccggcgaaaggaaggtgccgtccgcctgttgccagcgagctaaggcttcggcaccgacaatttttccgctgctcagggagacaataggctgatagtgtacgttaatttcgcgattgtctatcgcatcctggagacggtggcggggcgactgtagtcgacgcaaaatacgcagaataaaggccgcggccagcagacccgttacgatgcccgccggtagccagataaacgcctgtcgataccagctcctttccagcggagcggtcggtgcccagcttacgatagtaatgcccatttccggaaaggggtggatagcatactgaatgcctcggttttccagccgcaggggcgtctcatggtgaatgagcggaagaatagcggggtcaaggttaccgctgctggcaaccacagtattgcgttcccggccaataatagcgacgtcaatcggccatgcgccaaacggaatcacatcgataaaggacgccgggtcgatcatcacgatatagctgtcgctcccgagtgccgccatatagcgttttatacccagatcgttttgcgccgtaaaccaggcgcgataaccgtcgcgagtgattttcatgggcggagggaacgcgggaatatggctctctttttcaagtgaggagcaaacgggaatcgaatttttaagatacagaacttcctggacataccgaaagctataagacacgcggcgcatggcgagtaaatgggcactgctgcagggctcgcctttaaaggaggcaatatgcgttaacgcggcttttgcctggtcactgaccctttctgtacgtagcgccacccgggacgagaagatatccagctcttcattaaacctcttttcaacttgacggtgcgccagccacagactcaatcctatcgggaaaaggacagacaggataagcactcccgttaccaggctgaccagatgtcgtgttgtcacagtgatgtccttataaacacagcgtagagaaagtatatccgatcgtaaatcgcgccctcgaatgataaagctattttatcgattttacagattcaggcgccaggctaacgcgttacgccacgttgcttttgccgccaggaagagatcgtgaatgtttaccggttgaaaaaggagcgttgatagcgtattttattgttatgttataacataattgagagggcgcaatgaaacctgatattcatcctgtataccgcaccgtcgtatttcacgacaccagcgcaaatgaatatgtgaaagtgggatcaactatcaaaactgaacgtgaaatcgaactggacggcgtgacatatccgtatgtcactattgatgtgtcatcaaaatcgcatcctttttataccggtagacagaaaacgtttgatagcgaaagtagcgccgcacgcttccagaaacgtttcggtcattttatcggcgctaaacgggggtaaatgaaatgcaggtgttaaactcacttcgcaatgcaaaacaacggcatccggattgccagatagtcaaacgcaaaggacgcttatacgtgatttgtaaaacaaatccgcgttttaaggcggttcaggggcgtaaaaaaagacgttaaaaaaccaacagttcagggaaagcagtgcgtaccagggagggtgcgcacttttttattaccggctggcttctgcgcgggccagcgtaaaaatatcgtagaaggaaagttcgcccttacgggcaaccattttttgcagctggactttatgttcattatccacctgtggagactgaagaatcgtctcaatgagcgtggggggaacaaagcgggtgttgtaccattcgccgttgtaacagacccggaggtccagcacatcgatgtcgttatagtgataacgcggggcgatgtcgaaaaagaagaagccattaaatgcgataaataacaccactaacagccacactgaccccaccagcgtttctgattgcagcatgaccgccagcgtcgcaaaccaggctgcatacatcgcgataaataacccaggatgcttgcggataaaactgatactaaaacgcggcctgttatcgcgtttttcacggatgtttaagtcatcaatagtttcgctaagcaggcgctgtatctctgtcatcttttgccttcatgatttctgcgacataggggtagtaacagcccattttaaagggaggtgtaacgtgaaaaaagtaacagattaaccacgaattagcataacagttatcattttgactacaattttttaatgattcgcgccggatttccgcctaccacaacgtctggcggtacgttttttatcaccacagcgcctgaagcgacgacgacgttatcgccgatggttacgcccggattaacgacggctcgtccgcctatccagacattatttccgatagtgacgggtttacctaattctctgccgctgttgcgttcgacggcgtccagcggatgcgtggcggtatagatatgtacccctggcgcgagcatacaattatcgccaatatgaattgggcaaacatcaagcatgacgcagtcgaagttagcgtaaaaggagtgaccaagaaaaatattatagccgtagtcgcaacggaaggaaggttcaatataggcgtcttcgcatcgacccaacaggtcgcgtaaaatcgcctgacgcttatttatttcatcaggcgtagtataattgtattgatggatgagttgacgcgcccgcagtcgatcctggcataaagtttcatcggtcgggcaatacagtgccccagcgatcattttttgtttttcgtcactcatcgcgcgctccccttggtggatattatcgcaatagaagcaataataaagtattagagggaacgttccctgctattgctatgtgatctatatcactgttctataatagcccgttgtgttattagccagaacgaggaggcagataacacctgcgtgttctctaaaaagtaatgtagcgtgattaacgaatgaatttccatactgaagaggggatcttgtcgtagagtttgttcatcgtcaattctgcaagacggtgatccgcagctgagtaaaatacagccagctcattgtcggacaattcatatttatttttctcaatgacgcgctccagagtgtcaattgtctgacagcgccgtaaacgcatcaaataatcagttttagttaatggtttatcagacataaattctacctatgattgtaataatttttaacaagacaaactaacaggattggccctggtggcgttgacgaaacaacggaacaggcggttgcccgatttacgccatttttgcaaatcctgcgtattaataccatagctgctgaacaacataaaggtgtcgtccaggtattcatctatctgcgcaatcaatttattgtcttcattgtacttaattttataattaagcgcgaaagttgcaatatgctctatcagctcattgagctgcaggttgactgctgaggtcgggtcattaacccagccatggttgctttcttcaaggtttgcaagacagtcatgatacagggtttcgcaaagaaatttaagctgtgctatatcatgtcttttgggtgagtattcgtccataatgcatcccctttttagtggcttaaactaaccgaacaccttcgggatggatacaactaactaacctggtacttcccacgtcaccttatgatttaactataatctactctaaaaaacttttcatcgtcatattactaaaaattacaattgcgtgaaagccgcgtgttgccatactttttcgaattttaacagtgatcgtcggtcgcctaaaaaggaaccagttttattgtttgtgtaatcattgggttaacgttttttagcttttcaggctaaaacaatagactctgacaggagaaaatagccaggaatattcttaatatttcttaattaatggctgaattaagaaatggccaactttcctaagaaaagcctttaacgcagtaaggattataccttttattaatatggcaaaaaataatcaatctaacaataagcgtattttatgatttttgcgtaaaaaaggccgcttgcgcggccttatcaacagtgagcaaatcagcgatgttctgtcgaatgactatgctcaatatcttcgcttttacggctaaagcggcggcgtaccaccacgaagaagaccggtacgaagaaaatagccagtacggttgccgttaccatcccgcccagtacgccagtacctaccgcattctgcgcgccggaacccgcgccggaactgataaccagcggcataacccccagcatgaacgctaacgaggtcatcagaatcgggcgcaaacgcatccggacggcctccagcgtcgcttctaccagacctttcccttctttatccattaagtctttggcgaattcgacgataagtatcgcgttcttcgccgacaacccaatggttgtgagcaggcccacctggaagtaaacgtcgttagtcagtccgcggaaggtcgcagccagcagcgcgccgataaccccaagcggaacaaccagcattacggagaacgggatagaccagctctcatacaatgccgccagacacaggaagacgacgatcagcgatatagcatacagggcaggggcctggttgccggacaaccgctcctggtaggacatcccggtccagtcatacccaatgcctgacggcagcttgctggccagttcttccatcatcgccatcgcttcaccggtactcttgcctggcgccgcctgccccagaatttccatcgaaggcagaccgttatagcgttccagacgcggcgaaccatattcccagcgggaagaggagaatgcggagaatggcaccatctgaccatcgctaccacgaacgtaccagtcgttaatatcatccggcaacatgcggtatttcgcttcggacatcacgtaaactttcttcacacgaccgcgatcgataaagtcgtttacatagctgccgccccatgctgcgcccagcgtggtattaatgtcgctaatagatacgcccagcgcctgagctttttcctggtcgatatcgattttaaactgcggcgtatcttccagaccgttaggtcgaacgccgaccagcagatcaggatatttcgccacctcgccgaacaactgattacgtgcctgggtgagtttttcatgaccaagtcccgcctggtcaatcaactcgaagtcaaagccggttgcggtgcccagctcaacgatcgccggcaggttaaaggcgaagaccatcgcatctttaatttgtgaaaacgctgcggttgcccgctgggtaatcgcttcaaccttgtttttttcgcctggacgatcggcccagtctttcaacgacacgaatgcaataccggtattctgaccgcgccctgcaaaaccgaagccgttgacggcgaataccgattcaacgttggctttctctttgttcagatagtaatccgtgacctcatccagcactttttgcgtgcgctcttgcgttgcgcccgcggggagctggaccattgtcaggaatacgccctggtcttcatccggcaagaaagagcttggcagacgaacgaacagataagccataccgacgacgataatgagatagagcagcagataacgcccggtgctgcgcagaatattgcctacgctatcggtgtagtgatgcgtgctcttatcaaacaggcggttaaaccagccgaaaaagccttttttcccttcgccatgatcgcctttggcgacgggtttgagcatcgtcgcgcacagcgcaggcgtcaggatcagcgcgaccagcaccgacagcgccatcgccgatacgatggtgatagagaactgacgataaattgccccggttgagccgccaaagaaggccatcggaataaataccgccgacagtaccatcgcgatacccaccaatgcgccctgaatctggcccatggatttgcgcgtcgcttccttcggcggaaggccttcttccgtcataacacgttcgacgttctcgaccaccacgatggcgtcatccaccagcaagccgatggcgagcaccatcccgaacatcgtcagcgtgtttatcgagaaaccgaatgccgcaagcacggcaaaggttcccaacaacaccaccggaaccgcaatagtcggaatcaacgtcgcgcggaagttctgcaggaacaggtacatcaccaggaacacgaggataatcgcttcgaccagcgtttttaccacttcatgaatagagatcttcacgaacggcgtggtgtcatacgggtagacgattttcatccctggcgggaagaacggttccatttttttcagttcggcacgaatagcggtagcggtatccagcgcgttggcgccggtagccagtttgatgccaagacctgacgctggctgaccgttaaatttcgcaatgacgtcgtagttctcgccgccaagctcaattttcgctacatcccgcagacgaacctgggagccatcctgattcactttcagcaggattttgccaaactcatccgttgaggtcagacgcgtttgggcaataatcgatgcgttaagctgctggcctttaaccggcggcgtaccaccgagctgacctgccgcgacctgggcgttctgcgctttgatcgcgttaatcacgtcgaccggcgtcagttggtatttggtcagctctgtcggattcatccagatacgcatcgcatattgcgaaccaaacagctggacgtcgcccaccccagaggtacggctgatcggatctttcatattggcggcaacgtaatccgaaatatcctcctgggtcatggtgccgtcggtgttaatgacgcccactaccatcaggaagctacttgaggacttctcaacgctcacgccctgttgctgtacttcctggggaagtaacggcattgccagttgcaacttgttctgaacctgaacctgcgcgatatccgcatcggtgccggattcaaaggtcagcgtgatctgcacggtccccgtggagtcactgttggaggacatatacatcaggttatcgataccgttcatattctgttcgataacctgcgtgacggtatcctgtaccgttttcgcatcagcgccagggtaggttgcggagatcgtcactgctggtggcgcaatcgtcggatattgcgctaccggcaatttgaggatcgcgagcccccctgccaacatgatgatgatggcgatcacccacgcaaatatagggcgatcgataaagaaattaggcatgtcttaacggctcctgtttaagttaagacctgggctgagcaggttgatcaccgcttgcggcttgctgtttgttatccgcggtaatttcctgtactttaacctgtgcgccaggacgtactttttgcagcccgctgacgactacgcggtcgcccgctttcaatccgtcagtcaccagccacttatcgccgatcgcctggcttgcgacgatttggcgggtttccactttgttatcagcgccaaccaccagcaccgtggcatcgccgcgtggagtacgggtaacgccctgttgtggaaccagtaatgccgtcggttttgtcccttcctgcagacgtgcgcgaacgaacattcctggcaataaggtgtgatccgggttagggaagatggcgcgcaaagtaatagacccggtggtttggtcaacggtcacgtcggagaactcaagcgtaccggactgcgggaatttgataccgtcgctggtcaccaggtcgaccttcgctttgccgttttcctgtttcagcgaaccatttgccagctcctgcttcaggcgcaggaagtcattgctggactgggtcacatcgacataaatagggtccagctgctgcactgtcgccagcgccgacgcctgaccgttctgtaccagtgcgccttccgttacggatgacttaccaatacgaccgctaatcggcgaggtgactttggtatacgccaggttgatacgtgcggtttcaacggcggcttttgctgcgacaacagcggcagtcgcttgttgtgcgtcagccagcgcctgatcgtattcctgcttactgatgtactgcgtacccagcagcttttgataacgcttcaccgtcagttcagcgatattcgcggcggcctgcgcttttgccagatcgcccttagcgctgtcgtaagtcgcctggtaggtcgcaggatcaatctgatagagagagactcccgcttcgatatcacttccctcaacgaaattacgcttcaggataatgccgcttacctgcgggcgaacttcggcgatacggtaagcaacggtacgacccggaagttcagttgtgatttgcagtggttccgtttttagtgtgacaaccccaacttctggcatctgctggccgccttgctggtcctgtttgtcgtcacatcctgttagcgctaagctgcctgagagcatcagaacgaccgccagaggcgttaaccctctgtttttgttcatatgtaaacctcgagtgtccgatttcaaattggtcaatggtcaaaggtccttaaacccattgctgcgtttatattatcgtcgtgctatggtacatacatccataaatgtatgtaaatctaacgcctgtaaattcaccgacatatggcacgaaaaaccaaacaacaagcgctggagacacgacaacacatcctggatgtggccctgcgtttgttctcgcagcaaggcgtatcggcaacctcgctggcggagattgcgaacgctgctggcgtgacgcgcggcgcaatctattggcatttcaaaaataagtcggatttattcagtgagatctgggagctatcagaatccaatattggtgagcttgagattgagtatcaggcaaaattccccgacgatccactatctgtattaagagaaattttagttcatattcttgaagctactgtaacagaagaacgacgccgcttattgatggagattatattccataaatgtgagtttgtcggagaaatggttgtggttcaacaggcgcaacgtagcctttgtctggaaagttacgatcggattgaacaaacgttaaaacattgtattaatgctaaaatgctgcctgaaaatctgctgacccgtcgtgcggcgatactgatgcgcagctttatttcagggctcatggaaaactggttatttgctccgcaatcgtttgatttaaaaaaagaagctcgcgcctacgtcacgatcctgctggagatgtatcaattgtgtccgacgctgcgcgcgtcgacggtcaacggctccccctgataatattccaggaaaactcctggacattttctgtgtcgctattctgtttgttacaggcgtgatattcttgcgactcaattatttccggtctgcttgccggttcagacacttcattctcatgactatgttgcagctttataaacgttcacagcattttgtttttattacaattagcgtccttattatcctgctgtcctgtcagtctctggcatttgcccgggggcaaacgaatggcgacctgccgtcaaaagcggatgtgcaaaaccagctggatacgctgaataagcaaaaagatctctccgcccaggataagctcgtccagcaggaccttattgatacgttagctacgctggagaaaatcgagcgggtgaaagaggagaccgtacagctacggcagaaggtggcgcaggcgcctgaaaaaatgcgtcaggcgacggctgcgttgaatgcgctgagcgacgtcgataatgatgatgaaatgcgaaaaacgctgagtgcgctttcgctacgtcagcttgagctgcgcgtggcgcaggtactggatgatttgcaaaattcgcaaaacgatcttgccgcttataacagccagcttgtttcgctacagacccagcctgagcgcgtgcaaaacgccatgtataccgcctcacagcaaatacagcaaatccgtaaccgtcttgacggcaataacgtcggcgaagctgcgcttcgccccagccaacaggtgttattacaggcacaacaggcgctgcttaatgcgcagatcgaccagcaacgcaagagtcttgaaggaaataccgttttgcaggacaccctgcaaaaacagcgggattacgtgacggccaacagtaatcgccttgaacatcagcttcaacttttacaggaggcggtcaacagtaaacgacttacgctaacggaaaaaacggcccaggaggccatttcgccggacgaaacggcgcgtatccaggcaaacccgctggtaaaacaggaactggatattaaccatcaactcagccagcgtctgattgtcgcgaccgaaaacggcaatatgttgatgcagcaaaacattaaagtaaaaaactggctcgatcgcgcgctgcagtcggaaagaaatatcaaagaacagattgccgtcttaaaaggcagcctgttgctgtcgcgtattctttatcaacagcagcaaactctgccctccgccgacgaactcgaagatatgaccaaccgcattgcggatttgcgtctggagcagtttgaaatcaaccagcagcgtgatgccttattccaaagcgatgcctttgtcgacaagctggaggaggggcataccagcgaggtgaatgatgaagttcatgatgcgttgcttcaggtggtggagatgcgccgtgagctattggatcagctaaataaacagttgggtaaccagctgatgatggcgattaacctgcaagttaaccagcagcagttgatgagcgtctcgaaaaatctgaaagccattttgacgcagcagattttttgggtgaacagtaaccgccctatggactgggactggcttaaagcgttcccccaaacgttaaaagagcaattcagcgccatgaaaatcacggtgaactggcaaaaagcctggcccgcggtatttattgcttttttggccgggttgccgctcttgctcatcgccggtttaatccgctggcgtctgaaatggttaaaagcgtatcaacagaagctggccgccgccgtgggatcgctgcgtaacgatagtcagctcaatacgccaaaagctattctgatcgatctgatccgcgcgctgccggtgtgcctgattatcctcgcgcttggactgatcctgctgaccatgcagctaaatatcagcgatctgctctgggcctttagtaaaaagctcgcgatgttctggctggtctttgggctgtgctggaaggtgctggaaaaagagggcgtggcgatacgccattttggtatgccggcgcagttgaccagccactggcgtcgccagattgtacgcattagcctcgcattgctgccgctgcacttttggtctgtggtggcggagttgtcgccgctgaatctgatggatgacgtgctggggcaggcggttattttcctcaatctgctggtcataacattgctggtgtggccactgtgccgggaaagctggcgcgataaagaatctcacggcattcgactggtgaccgtgacgattctttccattattccagtggcgttaatggtattaacggcgaccggctatttctataccaccctgcgcctggcggggcgctggattgaaaccgtctatctggtcattatctggaacctgctttatcaaacggtgctgcgcgggttaagtgtagcggcgcgccggattgcctggcgacgcgcgctggctcgtcgtcagaacctggtaaaagagggtgcggaaggcgcggagccacaggaagaacccaccatcgcgctggagcagattaaccagcaaacattacgtatcacgatgctgctaatgcttgccctgtttggcgttatgttctgggcgatttggtccgatttgatcaccgtattcagctatcttgatagcattacgctgtggcactacaacggctccgaagctggcgctgcggtggtgaaaagcgtgacgatgggcagcttgctatttgccattattgccgcgatggtggcctgggcgctcatccgcaacttacccggcctgctggaagtgctggtgctttcacgcctgaatatgcgccagggggcttcgtatgcgatcaccacgatccttaactacgtcattatcgctgttggcgcgatgacagtattcggatcgctcggcgtctcgtgggataaactccagtggctggcggcggcgttgtcggtgggtctcggctttgggctacaggagatcttcggtaactttgtctcgggtttaatcatcctcttcgaacgtccggtacgcattggcgatacggtaacgatcggcacctactccggcacggtcagtaagattcgtattcgcgccaccactattaccgattttgatcgtaaagaagtgatcattccgaacaaagcgttcgtaacggagcggctaattaactggtccctctccgataccacgacacgtctggtgatccggcttggcgtggcttatggctcggatctggagaaagtgaaaagagtcttgctacaggcggcgatggagcatccgaaggtgatgcacgatccggaacctgccgtattcttcaccacctttggcgccagcactctggatcatgaactgcgtctgtacgtgcgtgaattgcgcgatcgtagccatacggtggatgaactgaaccgcgcgatcgatcgactgtgccgtgaaaatgatatcaatatcgcctttaaccagcttgaggtgcatctgcataacgcgaagggcgacgaagtcactgaagtgaagcgcgatctcaacggcggcgatctggcacctacggcaagctaaaaggcggtgggccgcgcgctttatgagtgcgcgcggcgccgctaatgcgaaagcgtagaaagctcttccggcgtaatgccggtgacgctggcgatgagcccgggttccagcccgttggcaagcattttgcgggcaatagcgcgcgcttcggcctcacggccttgtgctaacccttgctcaaggcctttttgcaggcccttttgcaacccttccgttcggcctttttcttccagccattccgctattgtcatcagttgttccttatactgcggcgcgccctgcgccagttgacgaattagcgccccgggttctgcggcgtttcctgctttcaacatatagttgatcagcacactgagctgcgcgtccgtcaaatgatcctgcgttaaaagcgtgataagggggtcgagcagttcgcttaaatcgcgttgacgaatatgtttttgcaggagctctaacatcgctatccgccgatgctgcaaaagctgattatccggcattgtcgtcaggtcgaccagcgcaaaatcgcggctgtataaggccttcgccatatccggtttcacaaacatattatgccagttaaggctatagggccacgggctttccggaccgtgataaaaaaggattggtaccaccagcggcaaggtatcatgaccggcatccagatgacgctgcatggcggcaatggcgtaacgcatcaggcgaaaagccatcagccggtctgatttgctctgatgttcaatgagcgcgtaaacatacccggggccgtgttgggtatgcagagagtagagaatatctgaatagcggctgcgtaaattgtcttcaacaaaactccccgactccagcttcagtgaatccagatcgcagattgcaagaaagtcttctggcatgtggatagccagaaagtcgcgggcgacctctttttgcatcagcatctgtcgaaataccgcatcgtgcggcgtggtgggtagacgttccatgccccgtcctttgttgcctgactgtagcgaccactctgtcagcgacaacgaggacaaaccagcgggcaattactctgtttgcgagtcgtcttccgtactttttaacttgttttcataatcacgcataactatttccagcgcgcgtagcaccgttcgtgccggtaagcgattctcttcaagcagcacaattaaatccacggccagtttgacttcatcaggggcattttcaagcgacatactttctccagggttagcgggttaaacgcgccagtacgttttctattttctccagcgcatgtcggcaacgcgccagccgtccttcatagatctcgacttccttttgcagcgtttgttgttcgacaaggccggtcgcctgcgccagacgaattttgcgctcctgtgtcatcgccagtagtcgacgttcaaactcctgatgctgtattcgtctgcgctgccaacggccaagccctggcgcggcggcgtcccactggcgcagcgaccaggcggcggtttcacgcgatatcgcctccagttgcgaagccagatgttccgccagccaggcgacttgcggcagttgctcatgttttaccgcctgacgcaacgcgacgagattggcgcctgcctcttccagatatccctgcaacagagtactgcgggtacggaaaaggtgtcggtcaaagcgcgcgcttaacgtcgcatgttgcgccagcggcgcgcagcgttggcgtagcgtcgccagcctctcttccagcgtctgtaacagcatagcggttttcaattcaacaccccgatgaaaataagacaggctgtgctacagtagccttctgtttgataacgattcgcattatgcaacgtactattttaatcatcattggctggctggcggtagtattagggacattgggcgtggttttgcccctgttgccgactacgccgttcattttactggcggcctggtgtttcgcccgctcgtcgcctcgtttccatgcctggttgttataccgctcatggtttggcggttatctgcgccactggcagcgctatcgggccatgccgccgggagcgaaaccgcgagcgatcgcgttgatattgctgacctttggtatttcgctgtggctggtgaatatgatgtgggtgcgggtgctgctgttggttattttggcctgtctgctgatttttatgtggcggataccggtgattgatgaaaagcaacaaaagcgctgaagcacacgaatcgctgttgcaattgtcgttcacagccagtaaattcgaccgttttcgagcacaggcgcaggcggtcaaagagtaaccgagcgttacccctgaccgaaaagtattgcgccgtgagtaacaccgtacttagcaggcatatatccatgaccgcgactgcacagcagcttgagtttctcaaaaacagcatcaaaagcattcaggattacccgaaaccgggcattcttttccgtgatgtcaccagcttactggaagacccgaaagcctacgcgctcagtattgaattgttggttgagcgttataaaaatgcgggtatcaccaaagtggtcggcaccgaagcgcgtggcttcctgtttggcgcgccggttgcgcttgggctgggcgttggttttgttccggtacgtaaaccgcgcaaattaccgcgtgaaactattgccgagacctatgaattagagtacggcaccgatcagctggaaattcatgtcgacgcgattaaacctggcgacaacgtgctggtcgtggacgatctgctggcgactggcggcaccattgaggcgaccgtgaagctgatccgtcgtctgggcgggaaagtcaccgatgcggcgttcatcatcaatttgttcgatctgggcggcgagcagcgtctggaaaagcaggggattacctgttatagcctggtgccgtttccagggcattgattcaggctattcgcactgctattttagccagagagacaacctcgctgtatcggcgaggttgtgttagcattacccttctatgaatccaccttccagcgtttcagagcctgccaatgagttatcaggtcttagccagaaaatggcgcccacaaacctttgctgacgtcgtcggccaggaacatgtgctgaccgcactggcgaacggcttgtcgttagggcgcattcatcacgcatatcttttttccggcacgcgcggcgtcggtaaaacctctatcgcccggctgctggcgaaggggctgaactgcgaaaccggtattaccgcgacgccgtgcggcgtttgcgataactgtcgggaaattgagcaggggcgttttgtcgatctcattgagattgacgccgcatcgcgtaccaaagtcgaagacacccgcgacctgctggataacgtccagtacgcgcctgcgcgcggtcgctttaaagtctatctgatcgatgaagtccacatgctgtcgcgccacagctttaatgcgctacttaaaacgcttgaagaaccgccagcgcatgtgaaatttttactggcgaccaccgatccgcagaagctgccggtgaccattttgtcgcgctgcctacagtttcatctcaaagcgctggatgttgaacagattcgccatcagcttgagcatattctcaatgaggaacatatcgctcacgaaccccgcgcgttgcagttgttatcgcgtgcggctgacggcagcctgcgcgatgcattaagtctgactgaccaggcgatcgccagcggcgacgggcaggtttcgacgcaggcggtaagcgccatgctcggtacgctggacgacgaccaggctttgtcattagttgaggcggtggttgacgctaacggcgaacgcgtcatgtcgcttatcaacgaggcggcggcgcgcggtattgaatgggaagcgctgctggtcgaaatgcttagcctgctgcaccgtattgcgatggtgcaactttcgcctgccgcgttaggcagcgatatggcggctatcgagcaacggatgcgcgaacttgcccggacggtgcctcccggcgatcttcagctctattatcagacgttgttgattggtcgcaaagaattgccctgggcgccggaccggcggatgggcgttgaaatgacgttactgcgtgcactggcgtttcacccgcgtatgcccttgccggagcctgaaacgccgcggcagtcttttgcgcccgtggccccaacggcggtaatgacgccgccgcagctgcagcagccgtcggcgcccgcgccgcagacatcgccagcgccgctgccggcgtctaccagtcaggtgctggcggcgcgcaatcagctacagcgcgcgcagggagtaaccaaaacaaaaaagagtgaaccggcagccgcatcccgcgcgcggccggtgaataactctgcgctggagcggctggcctcggtttcggagcgcgtacaggcgcgcccggcgccgtccgcgctggaaacggcgccagtaaagaaagaggcttatcgctggaaggccaccacgccggtagtacaaaccaaagaagtggtggctacgccaaaagcgcttaagaaagctctggagcatgaaaaaacgccggagctggcggctaaactggcggcggaagcgattgagcgcgatccgtgggcggcgcaggtaagccagctttctttgcctaagctggtggagcaggtggcgcttaatgcctggaaggagcagaacggcaacgcggtttgtctgcatctgcgttcgacgcagcggcacctcaattccagcggcgcgcagcaaaagctggcgcaagcgctcagcgatctgacgggaacgacggttgaactgaccatcgttgaagatgataatcccgcggtgcgtacgccgctggaatggcgtcaggccatttatgaagagaaactcgcgcaagcgcgtgagtcaattattgcggataataacattcagacgctgcgtcgattcttcgacgccgagctggatgaagagagtatccgccccatttgatcgtaagcccggcttgcgattgtgaaccatcaagagagagagcttatgtttggaaaaggcggtctgggcaatctgatgaaacaggcccagcagatgcaggaaaaaatgcagaaaatgcaggaagagattgcgcagctggaagtgaccggcgaatccggcgcgggtctggtgaaggttaccatcaacggcgcgcataactgccgccgcgtggaaattgacccaagcctgctggaagatgacaaagagatgctggaagatctggtcgctgcggccttcaacgatgcggcgcgccgcattgaagagacgcaaaaagagaagatggcttccgtctcttccggtatgcaactgccgccaggctttaagatgccattctgatgcaaaccagtccgctgttaactcagcttatggaagcgttgcgctgccttccgggcgttggccctaagtcggcgcagcggatggcgtttaccctgttgcagcgcgatcgcagcggcggaatgcgcctggcgcaggcgctgactcgggcgatgtcggaaatcggccactgcgccgactgccgcacctttaccgagcaggatgtttgtaatatctgctcgaacccgcggcgtcaggaaaacggccagatttgcgtggtggagagtcctgcggatatctacgccattgagcagaccgggcaattttccgggcggtatttcgtgctgatgggccacctgtcgccgctggacggcatcgggccggatgatatcggtcttgatcgtctggaacagcggctggcgtcagaaaaaatcagtgagctgatcctcgcgaccaacccgacggttgaaggggaggctaccgcgaactatattgccgagctgtgcgcggaggccggcgtcgaagccagtcgtatcgcccacggcgtgccggttggcggcgaactggagatggtcgacggtacgacgctgtcccactcgctggcgggacgccataagattattttctgaacaaacggaggcggcattcgcggcctccgcttgaaatcacacccgcttgtccccatctcaccctcaacgtatttttaccattaaaaatggcattgttgaggtctatccacatgaaaggacaagaaacgcgtggttttcagtcagaagttaaacagcttctgcacctgatgatccattctctttattccaataaagaaatcttcctgcgtgaactcatctctaacgcctcagatgcggcggacaagctgcgtttccgcgctctgtcaaacccggatctgtatgaaggagatggcgagctgcgtgtgcgcgtctctttcgataaagataagcgtacgttgaccattgccgataacggcgtggggatgaatcgtgatgaggtgattgaccacttaggcaccattgccaagtccggcaccaaatctttcctcgaatcaatggggtccgatcaggcgaaagatagccagctcatcggtcagtttggcgtaggcttctactccgcgtttattgtggccgataaagtgaccgtacgtactcgtgcggcaggcgacaagccggaaaatggcgtgttctgggaatcggcaggcgaaggcgaatacaccgttgccgatatcaccaaaaatgaccgtggtacggaaatcaccttacacctgcgtgaaggcgaagatgaattcctcgatgactggcgcgtacgctcgattatcagcaaatattccgatcacatcgcattgccggtagagattgaaaaacgggaagaaaaagacggcgaaaccgtgatttcctgggagaaaatcaacaaggcccaggcgttgtggacccgtaacaagtcggaaattaaagacgacgagtacaacgagttttacaagcacatcgcgcatgatttcaccgatccgctgacctggagccacaaccgcgtggaaggtaagcaggagtacaccagcctgctgtatatcccgtcgcaggcgccgtgggatctgtggaaccgcgatcacaaacatggtctgaagctgtacgtacagcgcgtgttcattatggacgatgccgagcagttcatgccgaactatctgcgtttcgtgcgcggcctgattgattctaatgacctgccgttgaacgtctcccgtgaaatcctgcaggacagcacggtaacgcgtaatctgcgtagcgctctgaccaaacgcgtcctgcaaatgctggaaaaactggcgaaagacgacgcggaaaaataccaaaccttctggaaacagttcggtctggtgctgaaagaaggcccggcggaagatcacgccaaccaggaagcgatcgctaaactgttgcgctttgcctccacccataccgactcttccgcccagaccgtgtcgctggaagattacgtctcccggatgaaagaagggcaggaaaaaatctactacatcaccgcagacagctatgcggcggcgaaaaacagcccgcacctggaactgctgcgtaagaaaggcatcgaagtgctgctgctctccgatcgcatcgacgagtggatgatgaactacctgaccgagtttgacggtaaagcattccagtcggtcgctaaagccgatgaatccatcgaaaaactggcggatgaagtcgacgaaaacgcgaaagaagcggaaaaggcgcttgagccgtttgtggagcgtgtcaaaaccctgctgggcgatcgcgtgaaagacgtgcgtctgacgcaccgtttaaccgacacgccggcgattgtcaccaccgatgcggatgaaatgagcacccagatggcgaaactgttcgccgcggctggtcagtccgtgccggaagtgaaatacatctttgagctcaacccggatcatgtgctggttaaacgcactgccgataccaaggatgaagcgcagtttaaagagtgggttgagctgctgctggatcaggcgctgttcgctgaacgcggtacgctggaagatccgaaccagtttatccgccgtatgaaccagttgctggtgtcctgataacgctcatctgactgccggatggcgacgcgaagcgtcttatccggcctacggcgagtactgtttgtaggccggataagcgccagcgccatccggcattttttataataccttctcttttctggatttctcttcgttaaccgtttcagcatcaggcggcttccttgagcgaaatgcgtgatggtggtatcgtttagcgctttttaaaaaatatcgacaacctttgaggggattttcgtaatgcgtattattctgcttggcgctccgggcgcgggtaaaggaactcaggctcagttcatcatggagaaatatggtattccgcaaatctccactggcgatatgctgcgcgccgcagtgaaatcaggctccgagttgggcaaacaggcgaaagatatcatggacgccggtaaactggtgaccgatgaactggtgattgcgctggttaaagagcgtatcgcccaggaagactgccgtaacggttttctgctggacggtttcccgcgcacgatcccgcaggctgacgcgatgaaagaagcgggtattgtcgtggattacgtgctggaattcgacgtaccggacgaactgatcgttgaccgtattgtgggtcgtcgcgtacacgccgcctctggccgcgtttaccacgttaagtttaatccgccgaaagtggaaggcaaagatgacgtcaccggcgaagatctgaccacccgtaaagacgatcaggaagagaccgttcgcaaacgtctggtggaatatcatcagatgaccgcgccgctgattggctactaccagaaagaagcggaagcgggcaacaccaaatacgctaaagttgacggtacgcaggccgttgccgacgtgcgcgcagcgctggaaaaaatcctcggttaattttttcgcgtagtgaagcacttatcaggcctgctgttatcccgcaagcctgataagcgtaacgccatcaggcaatcggtgccggatggcggcctgaacgccttatccggcctactggcatcgttagcgccattcggcaaattctcgtcttacctctcgcagcaattagttcttctttatcgcttttccgctacaattatcaacaatttgaatagataagaggcggcaatgcgtcagacgaaaaccggtatcctgctggctaaccttggcacgccagatgccccaactcctgaagcggtaaagcgttacctgaaacaatttttaagcgacagacgcgtggtggatactcctcgtctgctgtggtggccgctgctgcgtggcgttattttaccgctgcgttcgccgcgcgtcgcgaaactctatcaatctatctggatggatggcggttcgccgctcatggtatatagccgcgaacagcaacaggcgctggccgcgcggttgccagatacgcccgtcgcgctggggatgagctacggctcgccctcgctggaaagcgctgtcgatgaactgttagcaagcgacgtcgaccatatcgtcgtgctgccgttgtacccgcaatactcttgctcaacggtgggcgcagtctgggacgaactggggcggatactggcgcgtaaacgtcgtattcccggtatctcatttattcgcgattacgcggatgacggcgcttatatcgatgcgctggcgaaaagcgcgcgtgagtcgttcgccaggcacggcgagcccgatgtgcttctgctctcctatcacggcattccacaacgttatgcggatgaaggcgatgactatccgcagcgctgccgcgataccacgcgcgaactggtttccgcattgggactgccgccggaaaaggtaatgatgacgttccagtcgcgctttggccgtgaaccgtggctgacgccgtacaccgatgaaacgctaaaaatgttgggtgaaaaggggactggccatattcaggttatgtgtccgggatttgccgcggattgtctggagacgctggaagagatagcggaacagaaccgcgagattttccttgaagcgggcggtaaaaaatatgcgtacattccggcgctgaacgcgacgccggaacatattgatatgatgctgaaactcacggcgccgtaccgttaacgcggcgtcttcatcctcgccataaagaagcgtgcgccgtcctgcaaggcatcgtcggcgattgtcatcattcgcgaatagtgcagaaaggcgtgcagcgtgccgggatacattttgtattcgcagggctgctggtgcgcctgtaatgtctggtgcagcaagcggctgtcatcaatgagcggatcaaactccgcgctggcaataaagcagggcggcacatcgcgcgtgagatcgttattaaacagacaataccagggcgattcccgatcttcatcgttacgcagataggccttttcgtacatgtccagatcttcacgcgtcaggccgtcccacgcgccgccgaacagacggcggcttaccgaatcttgcaacccatacagcccataccacaacagaatcgcgataacgttaccgcagcgaatgtgcttatcacgtagccagagcgcgctggcaagcgccagcatggcgcctgcggaatctccggcgaaaccgattttctccacgttgagcgagtattcatcggcatgttgagagaagtagctgcataccgcgacggtttcttcaatggcctgtggataacgcgcttgcggcgacagcgaataatcaatgccgatcacggtgcagccggtataacgcgccagcagacgcattatccggtcatgcgtatccaggttaccgaggataaatccgccgccgtgcagatagtataaggtggcctggctggtcggctgcggcgagtagagccgggttgttacatcgccataaggcgtagggacggcgcaggtgcgggtggtcatggacggcgcgtcggcattccagaaacggcgctcaagaagataatactgacgctgggtctcaatatcgccatcggcaggccaggggggaaggcctggttgctggaagtttacgacggctgtcatttcgtctgacagtcgggtgagtacgggaattttattttccggcttcataaaacgctccttgtgaaagtgaaccattgtaaaaaacgcggctggagaaactgcgatctcgtcgtccgatattgaaacgccatcgtccgtcgcgcgcagcagggggaatgtgctaccatgcagcgctccgttattcatccgtaagcacaatcatgaaatttcccggtaaacgtaaatccaaacactattttcccgtcaatgcgcgtgacccgttgttgcaacaaattcagccagaacaggaaaccaacgcctcctgggtcgtcggtatcgaccagacgttggtggatattgaggcgaaagtggatgacgattttattacacgctatggattaagcgccgggcattctctggtgatagaagacgaggtggcggagaagctgtatcaggaactgacgcgggaaaatctgatcacccatcagtttgctggcggcaccataggcaatacgatgcacaattactcggtactggcggatgaccgttcggtgttactgggcgtgatgtgcagcaacattgagattggcagctacgcttatcgctacctgtgtaatacttccagccgtaccgacctgaattatctgcaagcggtagatggcccgattggccgctgtttcacgctgattggcgaatccggcgagcgtaccttcgctatcagccccggccatatgaatcagttacgggcggaaagtattccggaagcggtgatcgctggcgcttccgcgctggtgttgacctcatatctggtgcgctgtaagcctggcgaaccgatgcctgacgcgacgatgaaagcgatcgaatacgcgaaaaagcataacgtgccggttgtcatgacgctgggcaccaaatttgtgatcgccgataatccgcagtggtggcaggcgtttctcaaagagaatgtctcgattctggcaatgaatgaagaagaagcggaagcgctgaccggcgaaaacgacccgctgctggcggcggataaggcgctggactgggtcgacctggtgttatgcaccgccgggccgatagggttatatatggcgggcttcaccgaagaggaagcaaaacgtaaaacccagcatccgctgctaccgggagctattgctgaatttaaccagtatgaatttagccgggcaatgcgccataaagattgtattaatccgctgcgcgtttattcgcatattgcgccgtatatgggcgggccggaaaaaatcatgaacaccaacggcgcgggcgatggcgcgctggcggcgctgctgcacgatattacggcgaacagttaccatcgtagcaacgtaccgaactccagtaagcacaaatttacctggctgacctattcgtcgctggcgcaggtgtgtaaatatgctaaccgtgtcagttatcaggtactgaaccagcattctccgcgtctgacacgcgggctgccggaacgtgaggacagcctggaagagtcgtactgggatcgctaatctggcttgcccgatggcgctgcgcgcatcgggccgtccggcaaacccttaactggcgacgacttcacccgcgggcggcgtttcaagcagttccagcatcgcccgggcaatttctcgctcgcccatcactacctgattggctccccgctcggtaatatatttcacttcatcatcatagtgcgcgcgggcgattatctcgatatcaggactttttccccgcgctgaggcgacaatctcaccggcttcgtaaccgttggggatggtcaataacagccagcgagcgcagtccagatgcgccagattcatgatttcttcgttagcggcgttgcccagtacggcgcgaatcccgcgttcgcgcagttcatccacgcgggtacgggacgtttcgataaccaccagcggaatccccgccgccagtaatttttctcccagcagactgcctacgcggccaaaacccaccagcagggcatgattacagatatccaccggaatttgcttctcttcttcgatagcctcttccagagtttgctcttccagcgtttcggttttcgccagatacttctccagcagggtaaacagtacgggattaagcataatcgacaaaatagcgcctgccagcaccaggttctgtcccgcttgcggcagcaggttgagcgccatgccgagcccggcgagaataaaggcgaactcgccgatttgcgccaggctggcggcaatggtcagcgcggttcgcggcgagtggccgaacaaacgcaccaggaaaaacgcagcgatcgatttgccaaagacgataatggcaagcgtcgccaacaccgccagcggctgttgaatcaagactaacggatcgaacaacatgccgacggaaacaaaaaacaggacggcaaaggcgtcgcgcagcggcaacgtatcgtgcgccgcccggtgactcagttccgactcattaagcaccattccagcgaagaacgcgcccagcgcaaaagagacgtcaaacagttctaccgcgccaaacgcaatgcctaacgccagcgccagtacggaaagggtaaataattcgcgcgagccggtggcggcgctgcgggccataatccacggcaccaggcggcgtccgaccagcatcatgatggcgataaacgccaccactttaccaatggttatccccatatcgactgtcagcgaggctatgccgacatcgcctttttccaccatgccggcaacggcgggcagcaagaccagcgtcagcaccatcaccagatcttcgacaatcagccagccgatggcgatttgcccgcgctggctatcaaggagttgtcgctcctcaagcgcgcgcagcaggacgacggtactggctgtagacagacagagcccaaaaacgatgccggtcattaatgaccatcccagcacggcggaaagcgccatacccagcagcgtcgccaccgctatctgagcgacagcgccgggaatggcgatagactttaccgccatcaaatccttcagcgaaaaatgcagcccgacgccgaacatcaatagaatcacgccgagctccgccagctccggcgccagtttggtatccgcaacaaaacccggggtaaaaggtcccgccagaacgcccgctaacagatatcccaccagtggagaaatacgcaatttgttggcaatcatgccgagaataaaagcgagcacaaggccgccgacaatggtggtgataagcggggtagcgtgatgcattccgtctcctttggttgctggactccaaaactccgggtaatagtttatgacaatttcaatcaggatgtttataaaaaatggttgtgttttataaaaagatacgatctgaaggcaaaaagagcacggaacgtaaaagtgataagtatgggatggacaaagcaagatggcatcaggatgtacaggcggttaaagcgtacctttaaccgccataaaatcatgctttatgtcgattatcaggtaagaatatggtcagtatccccagaagcggcaggaaagcacagattttataaactaaatagatactggtatggtcggcaatcagccccagcaccgctgcgcccaggcctcccatcccgaaggcaaacccgaaaaacaggccggaaaccataccgatgcgtcctggcagcagctcctgggcatacaccagaatggcggaaaacgccgacgcgagaataaagccgataatcaccgttaaaatccccgtccagtacagcgtggcgtagggtaaaacaagggtaaacggcgcgacgccgagaatagagccccaaatcacatatttcctgccgattttatcgcccaccggcccgccgattaccgtcccggcagccaccgcaaacaggaaggcaaacagatggagctgcgcgttttgtattgataatccgaatttttgcatcagataaaaggtgtagtagctactgatgctcgccatataaaaatatttcgagaaaatgagtagcaataacacgctgaccgccagcacgactttattgcgcggcagcgggttagcgattatcgcttttggcttgcctttcgctatccggtgctgggctgcataccagcggctgatctgcgccagcaccacgatcgccagcagcgcggccagcacaaaccaggcgacattccctttgccatagggcgcgataatcacggcggccagcagcgggcccaatgaactgccgaagttaccgccgacctggaagatagactgcgccagaccatgacgtccgccggaggccatgcgcgccacgcgggacgattccgggtgaaaaacggacgagccggtacccaccagcgccgcagcgagcaatacgccgccaaaacttcccgccattgccagcagtaccagcccgctcagggtaaaacacatgccgacaggcagcgaccacggcatgggatacttatccgtccagtagccgacgaccggttgcagcagcgatgaggcgagctggaacgtcagggtgatcaaacctatctggacgaaggtcagcgagaactccgcctgcaacaggggataaatggctaagattagcgactggatcatatcgttcagcagatgggaaagactgatcgcgcccaaaataccaaacgaagtacgtgctttagcggccgctgcgggcgcgccggctaacggctgggttggttcactcatggccatagaaagtcacttaaattttatgcgatgttggagatagtaggatgtgtaattattacttgcctaacatacctgtgaaatgtgtttgaaggaagtctcaattctgaaaacatatttgtctattattgcaaggaaaggtaatttctgcggttgatattgagtcagggagagaaagatgaaatttttgaaacggggtgtggcgctggcgttactggcggcgttcgcgctgacgactcagcctgcacaggcttacgaaaaagataaaacctataaaattactatcctgcataccaacgatcaccacggtcacttctggcgcagcgaatatggcgaatatggtctggcggcgcaaaaaacgctggtggacagtatccgtaaagaggtggcgcaagaggggggaagcgtcctgttgttatccggcggcgacattaataccggggtgccggaatccgatctccaggatgcggagcccgatttccgcgggatgaatctgattggctacgacgctatggccgtcggtaatcatgaatttgataatccgctcaccgtattgcgccagcaggaaaagtgggcgaagtttccctttctttacgccaatatttatcaaaaaagtaccggcgagcgtctgtttaagccgtgggctatttttacacgccaggatataaaaatcgcggtaatcggcttaaccaccgatgacacggcgaaaataggcaacccggaatatttcaccgatattgagtttcgtaaacctgctgaagaagcaaaggtggtgattcaggaacttaatatgaatgaaaaaccggacgtgattatcgcgaccacgcatatgggacattatgacaacggcgatcacggttcgaacgcgccgggcgacgttgagatggcgcgtagcctgcctgccggttcgttggcgatgattgtgggcggtcactcacaagacccggtatgcatggcgtcggaaaataaaaaacaggtgaattacgtaccgggaacgccctgcgcgccggataagcaaaatggcatctggatcgtgcaggcgcatgagtggggtaaatatgtgggccgtgcggatttcgaattccgtaacggcgagatgaaaatggttaactaccagcttattccggtaaatctcaagaaaaaagtgacctgggataacgggaaaagcgagcgtgtactttacacgccggaaatcgcagaaaatccgcaaatgctctcgttattaacgccgttccagaataaaggtaaagcgcaactggaggtgaaaattggtagcgtgaatggccttcttgaaggcgatcgcagtaaggtcagatttgtccagaccaatatgggacgggtgattctggctgcgcagatcgcgcgcaccggcgccgattttggcgtgatgagcggcggcggtattcgcgactcgattgaggcgggagatattacctataaaagcgtgctcaaggtacagccgttcggcaacattgtggtgtatgccgatatgagcggcaaagaggtggttgattatctcaccgccgtagcacagatgaaaccggactccggcgcctatccacagctcgccaatgtgagctttgtcgccaaagagggcaagctcaccgatctgaaaatcaaaggcgagcctgttgatccggctaaaacctatcgcatggcgacgctgagtttcaacgccacgggcggcgatggttatccgcgcattgataacaaaccgggctacgtgaataccgggtttattgacgcggaagtgctgaaagagtttattcagcaaaattcaccgctggatgcggcggcgtttacgccaaatggtgaggtgagctggctgtagcggtacggatagccatttctgcctgatggcgcgcaaccttaaggcctacggattatgtctgctgtaggccggataaggcgtttgcgccgctatccggcaatgtattttacgcaggcttaatcccgacgcgcgatatcagcgaatttagcacccaggatggcggccaaatcgtcagccgccagttcaatatccagcccgcgtttaccaccggaaacataaatagtggcaaacgtgcgggctggcgcgtcaatcagcgtgggcagccgtttcttctgtcccagcggactgatcccgccgaccagatatcccgtggtgcgttgcgccaccatcgggtcggccatatcgacctttttcgcgcccagagctttggcgacttttttcaaatccagctgtccggctacaggcgtcacggcgacggccagttgcttcatatcgccattcacggcgaccaaaagcgttttatacacctgatcggcgtttagcccgagcttacgcaccacttcatcgccaaagttagtttcattcggatcgtgatcgtaggtgtgaatgttaaacggaatcttgtttttttcgagtaacttaactgcgggtgtcataacgttccttcttactacagacgtgatttgccatcagcatacgcccgaaagcggactaaaaaatagtataatcttgtgcattaggtcttggcagttgcggcaactttgagcgacaatctgaagatccgaagcgaaagcgtcgggataataataacgatgaaattcctctttgacgggccaatagcgatattggccatttttttatttcaatatttgcggtaggttgccttcgccgtacagatgtagcgcccctacggctaccacgtagcgtcccggcggcagtgccagcagcgcgtcgcgccaggcttcattgcgtttcaccatcagtacatcatacagcggctggctaaacgttctggggagcgaagcgccgacgctggtcggcggctgctcaagccaccagccgatcatcacctgcaaaagccgtgcgttggtgtgccagtgcgtcagcgtgtcgtcgagcagcgccatcccgccatcgggcagatcgcagagtagttcgagctggtgtttcgccccttccagctcttgcaccggcagcgacatttcgcgggcagcctgtaatagctgataatcaatgccatagtccgggcgcaatcccagccgttgcgcctgcgtggcctgtagcaccatagctatctgccataaaggttgattatcaaaatggatcagcggcatacccaactcactgacccgtttttccagtgcgcttagctgcccggcgctgagacgttcgaccaacggcgggcatttggggagattgctgaatggcgtttcgttaccagaaatatccgcttcaacgaccagcgcgtcggcctggtgtagctttttcaccagctttgctggaagaggagccatatcgcgcgtccccatatgaatactgccaaccagatgcagatgacgaccgccgggcagggagagatcgatagcaggccaactatttggggtaccacgcagcgcgcgccataaacgtttaagttgatttaatagctccatacgcgctccctttgaaaaagctcatgctagcgcgttggagaaaagggcgcaatgcgccctgacgggacgtcaacgatcggtcgggttattcgctgccgtcgagataggccgttctggcgatggtcatttcaagctggcatttataaatactgatgcgcttttcagcgggtatggcctcggatttggcatcgctaagtttgccgcactgctgctctttttgggtcacccagactcgctgctcttgttttaatgccgttcgggcagaggcgggtagtgaattccagacctgattaagctcgcgatctctactttcaaatttctttgctgcgatttcaatcagtgagttattttttttctttataatgctatcaccagataccgtcattcttgccattacataaatagatcgcgccaatttatcggttttttgcacagaggtgacaacaatatctttgttgttgtctgctagctgaatattgtagttaacctgtttccaggtcaccgtattgtttattacctgtccatccccttgtgaaatatagaatagagtatttggtaagtctttcattaatttaaataatggctgaggaatacccatggcgacggtagccgagcaagttcgtaggttggcattttctgcttgagggttctgcgtgattacatcactgaattgaacaggaatagcccggagttgttgctcgtattgagtctgggggatatcgaagaaaagcgtggagggctctttaatatagtcttgctgtaaacgacctaatgcttcattgtaaatccattcttttgccgccgtgactgcattatcgttgccacattttaactctggagtggaatcaaataaccctgcataactgacggcgggagaaagcaggaaaagaagcgtaactgcttttctaaacataaataacacatccttatgattcaaaaaaacattataaaatgttgttttttatttttctacaggatgtgcggttaaatttttatatattgatacggtaaattactgatggcttaataatatatcaggcagctgatgctgcctgatatagcgtttttacgctttcggtttaaaacgcaatagccggttggcattgctgacgacggtaatggaagacagcgccattgccgcgcctgctactaccgggtttaacaaggtaccggtaaacggccacagaataccggcggccaccgggataccaatgctgttgtagataaatgcgccaagcaggttttgtttcatattgcgcaacgtcgcgcgcgaaatggccagcgcatccgccacgcccatcagactatggcgcatcagcgtaatcgccgcggtttcaatcgccacatcgctgccgccgcccatcgcgataccgacgtccgcctgcgccagcgcgggcgcatcgttgataccatcgccgaccatcgcaacctgacgaccctggctttgcaggcgtttaatcgcatcggctttgccatccggcagaacgcccgcaatgacttcgtcaatacccgcttctttggcaatcgcgttagccgtcgttgggttatccccggtgagcattaccagacggtatccggcgttgtgcaggcgttcaagcgcggcaatactatcgctgcgcaatggatcgcgtaccgccagtaacgccgccgctttaccgtcaatcgccagcaggaccggagtcgagccttgcgaggcctgcgcggtgatttccgccgtcatgtcatccgtggcgacgtgctgttcgttcagcaacgcctggttccccagaagcagttgatgaccttccgcttcaccgctgacgcccagtccgcgcagcgttctgaaaccgttcacctgcggcagtttatcatcgccggctttttccagaatcgcatgggccagcgggtggctggagccttgttcgagcgcggcagccagacgtaatgcctgagcttcctcaacgccgttaaaggtttttatcgccaccacttgcggcttgccttccgtcagcgtcccggttttatcaaaaacgagggtatccaacgtactggcgcgttgcagggcatcggcgtcgcgtaccagcacgccgaattcggcagcgcggcctacgccggaaataatcgacattggcgtcgccaggcctaatgcgcaagggcaggcgataatcagtacggtggtggcgatgaccagcgtataaacaatttgcggcgccggcccgaagaaataccagatagcggcgctgaacagcgcaatggccacgacgacgggaacgaataccgcggagattttatcggccagttggccaatttccggtttactgctttgcgcctggcgtaccatgcgaataatgcgtgacagcgtggtatggctgcccaccgcgctggcgcggaacaggacgctgccgtcctggacgacggtgccggcatgaacgctgtcgccttcgcctttttgctgcggaataggttcgccggtcagcatggcttcatcaagccacgcttcgccttgggtaatttcgccatccaccggcacgcgatcgccggtagtgagccgcagcagcatccctggctgaacgtccgccagcgggacgcttttttcgccgtcttctgtcacgacgcgtgcggtgggcggggtgagatcgagtaatttttccagcgcttttgaggaacgctgacgggcgcgcgcttccagcatgtgtccgagattaatcaaaccgataatcatcgcgctggcttcgtaatagaggtgccgcgcttccatcgggaaccactgcggccacaggttgacgctcatggagtagagccaggcaaccccggtgccgagcgccaccagcgtatccatcgtcgccgtgccgttcagcaggcttttccacgcgttacggtaaaagtgaccgcccgcaaagaccatcaccgcaagcgtgatcaggccaatagccagccacaggctgcggttgtcgtcggtcaccatcatgttatcgccgatcatcccccagaccatgaccggtataccgaccgcaagggcgacgattgcctgccaacgaaaacgtttcatggtggcgatggcggtttcctgctggcgctcgcggcgtttgatgtcatcttcaatcgcttctgcgccgtagccggctttttccaccgcctgcactaaatcagcggcggacgcgctgcccatcaccagcgcagtgcgttccgccaggtttacccgtgcctgcgtgacgcccggtacgctttgtagcgcatgttgtacgcgggtgacacaactggcgcagctcatgccgcttaacagcaactgttggctttcttcatcggccgtcgctaccggaagctcatgaggaaccgctgccagtgcttccgacgggattgatgactccgtcagcggtttagcctttgggtggcttaacgtcgcgccatacccggcttgtttgatggtttcaattaacgcgtccgcactggcggtaccggtaacgtgcgcttcggttacggtgacgtccgccagctcaacatccggacgttgttcaagactttctttcacgcgtttaacgcaatgaccgcaggacaaaccgtccagggtcaggtcgatagtttgagacatagtaaaaactcctttatgattggtcatcaattcattgaccttagtaatcgtagtgactcactgtgataaaggttaaaccttccagcaaggttaaggtcaagggggaaatatgaatattagcgatgtggcgaaaaaaaccggtttaaccagcaaagccattcggttttatgaagagaaagggctggtgacgccgccattacgtagcgaaaatggttatcgcacctacacgcagaagcatttaaacgagctgacgttgctgcgacaggcgaggcaggtggggtttaatctggaagagtgtggcgaactggtcaatctgtttaacgatccgcgacgccatagcgcagatgtgaaaaagcggacgctggaaaaggtcgcggagatcgagcgccatatcagcgagctgcaatcaatgcgcgatcaactgttggcgctggcggagagttgtcccggcgatgacagcgccgactgcccgattattgataatctttccggctgctgtcatcacaaggcgcaaaagccacgttgattaaacggcacgaatgcgtaaggtgatgccttccacggcgatcacttcgacatgcgtacctgcgcgcaggtcttcgtcagcgcataccggccacgagctgtcgccgacacgcatatgaccccgtccgttcactaacgcggcatcaagcataaaccggcggcctaccagttgttgtccgcgttggttaaggcggctgtcggtcggcttctgttcccgcacgcgacgcgccagccagcgccaccaaagccaggccgccagcaacgttaaggccgcaaacagcacgccctgccattcccagccgagcggtaagagccagacggttaagccggtaatcactgccgccacgccgctccacagcaaatagccgttaccgccgagcatttccgcagccaacaacaggccgccgaggctaagccagaagatatgcggatgcaccagaatcatcgctatcatgcttttttccgttcgctggcgctgtccttaaccagctcgctgatcccggcgatagcgcccatcagactgctggcatccagcggcatcatgaccactttgctgttattcgccgagccgatttgctgtaacgcttcggtgtatttctgcgccacgaagtagtttatcgcctgaatatccccggcggcgatggcttcagacaccatctgcgtagcgcgggcttccgcttcggcggaacgttcgcgcgcttccgcctgcaggaaagcggactgacgttcgccttcggctttcagaatctgcgactgtttttccccctcggctttcaggatttccgcctgacgtaccccttcggcctcaaggatataggcgcgtttggtacgttccgctttcatctgggcgttcatcgaggagatcaattccgcgggcgggcggacatcgcgaatttcgatacgggtaactttaattccccacgggttggtggcttcatcgacaatatgcagcagccgcgtgttgatgctgtcgcgctgggagagcatttcatccagctccatcgaaccgagtaccgtacggatattggtcatggtcaggttaatgatcgccagttccaggttactgacttcataagcggcgcgcggcgcatcgataacctgaataaaacagaccgcatcgatagtgacgttggcgttatcttttgagatcacctcctgcgacggaatatccagcacctgctccatcatattgatcttgcggccaattctgtccataaacggtacaacaaggcttaatcccggctgcagggttttggtgtaacgtccaaagcgctccaccgtccactggtatccctgcggaacgattttgacgcccgcgccgacgatcaccagcgcgacgaaaatgagaatagggataagaatgagcatagctaaacctcctgttgcgttgtccataaaccgattttgctgacgaattaagcgaattatacctgattcagtaaagcatgttccccccttattaattacagggatacactatcgctataaaaatatgaacaacggatgcgcaataaatgacagaacgtagcatgttgcttgagttaaagcaggtcggttaccggactgcgacgacaaaaatagtgaataacatcagttttacgctgcaacgcggcgaatttaagttaattaccggtccttctggctgcggaaaaagtacgttgttgaaaatggtggcctcgttaataagccctgatatcggcgtgattctttttgaggggcaggatattactactctgagtccggaagcctatcgccagcaggtttcttattgcgctcagacgccagcgctatttggcgatacggtttacgataacctgatttttccctggcaaattcgccatcagcgcccgcagccgacagccttcgcagacgatctggcgcgttttgaactgccggagacgattctgcaaaaaccgattaccgcgctttccggcggagaaaaacagcgtattgctctaattcgtaatctacagtttctgccgaaaatactgttactcgacgaaataaccagcgcgctggatgaacataacaaacggaatgtgaatgatattattcatcgctatgttcgcgataagcaggtcgctgtcttgtgggtaacgcatgataaagatgaaattcaacacgcggataaggtgataacgttaacgccatctgccggagagatgcaggaggcgcgttatgaacgagcataatattaccaatacctcgctggcgttatcgatgctgctggtggtggtcgcgatgctcatcagtcacaaggaaaagctggcgctggaaaaagatattctgtggagcgtatgccgggcggtgatacagctcattattgtcggctatgtactgaaatacatctttggcgttaatcatgccgccctgacgctactgatggtgctgttcatctgttttaacgccgcatggaacgcgcaaaagcgcagtaaatatatcgataaggcatttctctcctcgtttatcgccatcaccgtcggcgccgggctaacgctgacggtactggtgcttaccggttcgattgaatttgcgccgatgcaggtgattcccatcgctggcatggtcgccggtaatgcgatggtagcggtagggctgtgctacaaccaactggggctgcgttttcatagcgagcagcagcaaatccaggaaaagttaagtttgggcgcaacgccgaaaatggcctccgccgggcttatccgcgatagcatccgcgcatcgcttatcccgacgatcgactcggcaaagaccgttgggctggtgagcctgccggggatgatgtccgggctgatttttgccgggatcgatccggtaaaagcgattaaatatcaaattatggtaacgtttatgctgttgtcgacagccagcctgtctaccatcattgcctgctatttaacctaccggaagttctataattcgcgtcatcagttggtagtgatgccgctcaagaaatcatgatagttgccggatgatggcgcaagcgccttatccggcctgaggacgacaggtaggccagataagcgcgccatcaggcaagagaggattaatacagtagcgcgtacaactggcggcggtatttcgacgccagcgcgtcgccggtgccgagcgcggcaaggatctcctggaaggttttgcgcgtctgtccctcggcggcggtaagatcttttctcagatggctgaacagcaattccagcgcttcttcattacgtccgacctggtgcaactgcaatgccagttgcgttgccaaagccgcatcctgcggattgtccgcgacttgctgctgaagttgctgaatttccggcgtatccgccgcctgtttaagcagttcgatctgcgcaaccagcccctgataacgggtatcctgatcctgtagcgggatagtttttaacaccgcttcggcctcttcagagcggttcagcgcaatttgcgcttccgccagtaacaggccaatctcactgttctgcgaagagagctgccaggcgtctttgagcaacggcagcgcgtcaatgtagttgccctcctgcattaactgcatcgcttgttgcgcctttagctcttcttcgcgcggcagtactttatccagcagagcgcggatcgcctcttccggctgcggtccctggaaaccatcgaccggttggccattctggaacagatagactgtcgggatggcgcgcagcccaaactgagcggcgatcatctgttcggcgtcgcagtccagctttgccagaataaactgaccgtggtactgggcagccaggctttccagcactggcgttaattgcagacagtgttggctgcgttcagaccagaaatagaacagtaccggcgtggtcatggactgctctaaggtctgctgcaggttggattcattaatattgacaatgttctgtacggacatggcgtcgctctcttttgtctgtgtcacgtttacatgggggctgacgggcgcgcttcaactcagctttgtaaaattttatccagcatccggcccggcaatatgcgtttcagcgccatcaccgcccaggtgaccagcgtaacgggatagcgcagcctgggtttatcgcttgcaaaagcatgacgtactttcgctactaccgcgtcaggatcgcgggtgaaacgtgcggcgatgccgggattttctaccggtttatcacgctgcgtctggttaacgttatcggtaaaacgggtacgaatcggccccggttctatcaggctcactttaatgcctgtgtgccgtagctccatacgtagcgcgtcagaccaggcttcgagcgcatatttgctggcggcgtaagcgccgcgccctggggtggaaatcagccccatcaccgatgaggtcatcacaatgcgtccttcgccatgcggcaacatggcgggaagtaagcgcatagtaagctgatgcgcgccgaagaaattactggaaaactgttgctccatctgctcacggctgatggtggaaagggggccatacacgccgtagccggcattgttaaagatcccatacagacgattatcggtcagggcgatcacttcatcggcggcacgatccacgctttcaggggagtcgagatcgatcaacacgccggtaaatcccatactgttcatccgggcgacatcatcaggtttgcggcagcccgccaggatttgaaagccctggcgtttaagctcaagcgcgctgtccagaccgattccgctggaacatcctgttattaagaccgatttttgcataactttacctgtcaggatctccgttgatttaagagtcgtggttaactatatccgtcatacttcaagttgcctgtgcgttcgtttactccagtcacataggtatctatgctcctggacattctcttacgtgccgccttcatgcaactcgaatgattcaggagagaaaaggggtcaactgcttcgccatccagtcggcaataaacggctgggcgtcgcggttgggatgaatgccgtcatcctgcatccactgcggtttcagatatacctcttccataaaaaacggtaacagaggaatatcgaactctttggcgagcttaggataaatggcgctaaaggattcattataacggcgaccgtagttagcgggcagatgaatttgcatcagtaacggttgggcatcggcggctttcaccgtctgaatgattttacgtagcgtctgttcggtttgcgcaggcgcaaaaccgcgtaggccatcgttgccgccaagttccaccactacccagcgcgggtgatgctgttgcaacagcgccggcaaacgcgccagtccctgctgcgaggtatctccgcttatactggcattaacgaccgacgttttgttttgccatttatcattaaggagcgacggccatgccgcgctggcggccatacggtaaccggcgctgaggctatcgcccagaattaataaggtgtctgcggcggcggcacggaaagttaacaggatcaaaaacaggaagggcaaatgccagcggaaaacagtgttgaagttcatcgtctcaggaagtccgtcggtcagggtgagcatgagctttccatccttaccggagttgaactggttgtcaaacgcggcgaaaccattgcgctgattggcgaatcaggatcgggaaaatctacgctgctggcgattctcgccggactggatgacggcagtagcggagaggtcagtctggtcgggaaaccgcttcaccagatggacgaagaggcgcgggcgcagcttcgcgctcagcatgtcggttttgtttttcaatccttcatgcttattcctacgcttaacgcgctggaaaacgttgagctaccggccctgctacgcggtgaaaacagcggtcagagtaaggcgggggcgaaagcgctgctcgaacaactgggactgggaaaacggcttgaccaccttccggcacagctttccggcggcgaacagcagcgcgtagcgctggcgcgcgcgtttaacgggcgtcctgatgtgctgtttgccgatgagccgacgggcaaccttgaccgtcagaccggagataaaatcgccgacctgctattttcgcttaaccgcgagcacggcaccacgctgattctggtgacgcacgacccggcgctggcggcgcgctgcgaccggcggctgcggttggtcaacggtcagttacaggaggaggcatgatagctcgctggttctggcgcgaatggcgctcgccgtcgctgattattgtctggctggcgttgagtctggcggtggcctgcgtactggcgctcggcagtatcagcgaccggatggaaaaagggttaagtcagcaaagccgcgagtttatggcaggcgatcggacgctgcaaagttcgcgggaggtaccgaaagcctggcttgaagaggcgcgtaaacgcggccttaacgtgggcgagcagttaacctttgcgaccatgacgtttgccggcgatacgccgcaactggccagcgtgaaggcggtagatagcgtttatccgatgtacggcgaattgcaaacccgtccaggcggagtgaaagcgcagccgggtagcgtactgctggcgccgcgtctgatggcgctgcttaatttgaaaacgggcgataccattgatgtcggcgacgtgaccttgcgtattgccggtgaagtggtgcaggagccggattccggatttaacccttttcagatggcgccgcgtctgatgatgaatatggccgatgtggcaaaaaccggtgcgatacagccggggagccgcgtgatgtggcggtataaattcggcggaacgccgcaacagcttgctggctatgaaagctggctgttaccgcagcttaaaccggaacatcgctggtacggactggagcaggatgacggggcattggggaaatcgctcgaacgttcgcagcagtttttgctgctttcggcgttattaacgctactgctggcggtagctgccgtcgcggtggcgatgagccattactgccgtagccgctacgatctggtggcgattttaaaaacgttgggcgcgggccgggcccagttgcgtaaacttattatcggacagtggttgatggtgctggggctttccgccgtcacgggaggcgcgattgggttactgtttgaaaacatattgctggtgctgctaaaaccggtactgcccgccgatttgccgcccgccagcctgtggccctggctgtgggcgctgggcgcgatgacggtcatctctctgctggtcggtttacggccttatcgattgttgctggcgacccagccgctacgggtgctgcgccgcgatgttgttgctcgcgtctggccgttaaaaatttatttgcctgtcgcctgcgccgtcgtggtggcgttgctcgtcggattgatgggcggaagtatgctgttgtgggcggttctggcgggcgccgtgatactggcgctgctgtgcggtctggtgggctggatgctgcttaacgtgctgcgcggcatgacgttgacgtcgctaccgctgcgtctggccgtcagccgacttctgcgtcagccgtggtcaacgttgagtcagctttcggcgttttcgctttcgtttatgctgctggcgctcttgctggtgctgcgcggcgacctccttgatcgctggcaacagcagctcccgccggaaagtccgaactatttccttatcaatattgcttcagaacaggtcgcgccgctgaaagcctttttggcggaacatcaggtgatcccgcagacgttttatccgattgtgcgggcgcggttaacgaagataaacggtaatccgacggaaggtcagcaggatgagtcgctcaaccgtgaactgaatttgacctggcaggatacgcgcccggcgcataatccgctggtcgccggtcactggccgccaaaaccgggcgaagtctccatggaagaggggctggcgaagcggctgaacgtcaaactcggcgatagcgtaacctttatgggcgatacccaggcatttagcgctaaagtcaccagcctgcgtcaagtggactgggaaagcctgcggcccaactttttcttcatttttccttccggggcgctggacgggcaaccgcaaagctggttgaccagttttcgctgggagaatggcaacggcatgttaacgcagcttaaccgcgagtttcctaccgtcagcctgttagatatcggggcgatcctgaaacaggtgggacaggtgctggagcaggtcagtcgggcgctggaggtgatggttgtgctagtcaccctctgcggcatgttgctattactggcccaggtacaggtcgggatgcgtcagcgccatcaggagctggtggtgtggcgcacattaggagccggaaagaaactgttgcgtaccacactctggtgcgaattcgccatgctggggttagttgccgggctggtcgccgcgattggcgcggagacggcgctggcgatcttacaaatcaacgtttttgatttcccctgggagccggactggcgtttatggggcgcactgccgttttgcggcgcgctgctgctttccgtatgcggcggctggcttggcgttcgtttgctgaaaggcaaagcgctattccgacagtttagcggatgattcatgatgtgaataatttcgcgccggtttttaaaacggcgcgtacttttttagtcgcacaaattgataactccttgatttttagtagcacaaatcattaaaaaatacacaacacgtaaggttttataacagttattatttgcctgctaaatgatttggattggctatctatcaaggaaaatataatgacaattaaaataacagcgttggcggcatcgatcggcgcggcagtggctttcatgcctttcgccactcaggcggaaatcaccgttttaaaacaagatccccaggcgggtaatccactcagccgactcaatttcaccgttggcgggagtattcgtccgcagttccagaatatgaccggcaatgacggcgcgaacggttataaacgtaatggttttgatggcgggacgcgtttccgcttcgccgcggattattatctgtttgatgatatcagttggattagctattacgagctgggcgtcaatatccctgcggtatttgactgggataaccattatgcgaagggcgcgactgataccactcgccgtatgctgtataccggcttcaagagcgcgacgtggggaacgctgaccttcggtcaacagaacagcatttattacgatgtggtgggcgtaaaaaccgatatctgggattacgacatgataggtcaggcgccgggcaacgggattaacggcgactacgatggttcttatcgcacgcgtaagtcattgaagtataagaaaagcattggcaatgtcgatctctacgcgtcttatctgttcagcgacgattataatgccaataacggcctgaattacaagcgtaaaggcggcggttctttaggcgcggattaccatctcaccgacgatctgacctgggggacggcatggaactatacccgtgcggagatgcgcggcaacggcaataaaacttacgatcaaaatattgtcggtaccgcgttaagctggacgccggaaaactggactatcgccgcaggcggcggttggtatcagaactttatgacgaccaaaaaagtgtctgtgaatgattactttgccggcgatgcgtggggtctggaatattttgtcggttacgctttcccgattggtcagtatgccgtgaaagctattcaaccgtactttatgggcgaccgcattgaatatgtgaatggccgcgactatctgcgcaccgataacggcgtggggatcaccttccaactggattatggtttccgcgttgattatgaacatgttttcacttccagcactgacaatctgggcgatatgaacctggtgcgtctgcgttacgatttctaaagcgttttcctctgccggatgttggcgttaagacctcttatccggcatttccctttacgccattcccgcctgacacacgcctgagcgcctgcctcgtacatttaacgacacaccaggaaacatcatgaaataatttcaaggacagcaggctgtgatctgtgtcatgttaagaaatagcctttcgtttgggccaaaacagacgatgccgcatgaacggcatccggcacagcatcacactatttaaaatggagaaattatgggattgcgtcagagtttacgcattgcggccagcacgctattactggcctgcggattacagtttgcccatgccgatagttccccgcaaacgatcgtatttggcgtcgcgccagggccgtatggcgacatggtgaagcaggcgattgcgccgacattaaaagaaaaagggtataaggtcgtggtgcgcgagtttagcgactatgtccagcccaatatggcgttagctaatggcagcatcgacgccaacctctttcaacataccctctattttgacaaattcaccgctgacaaagggctgaagctcagcaaacttattgtggtaccgaccgccgggatgggcttctattcacgtaaaatcaacagcctggatgcgcttaaaaaaggggacattattaccctctccaacgatccgaccaacctggcgcgcggccttcgcttcctgcaatcgttggggcttatcacgattaaggacaatatcgatccgaccaaagcctctgaacgagatatcgccagcaatccaaaaggactggttttcaaaccgctggaagccgcacagctaccgcgcacgctggatggcgtgaccggcgcgctggttaacgggaactttgcggtggcggcaggactcgatctctccagcgcgattaagcaggaacacctggatgagaatctgaaaaatatcattgcggtacgcagtgaagatgccgataagccgtttgccaaagatattgtcgaggcggtgaaatcgccggcttatcgcgcggttatcgacgatccaaagaatatttatagcgccttccagaaaccggaatggatgaccgcgacaccctgatcgcagcggtggccatccccaatttctgaggtgaatatgattgaaatagaaaaagtctgcgtcgattttaccgccggtcgcggtacccccacgcgcgcggtggatgatgtgagcctgcatatcgccgcgggcgagatttttggcattgtcggtaccagcggcgcaggaaaaagcactctgctgcgtaccctgaacgccttaacgcgtcccagtcaggggcgcgtcaacgtcaacggcgtggaaatttcggcgctggacggaaaagcgttacgccaggcgcggcagcgtattggtatgattttccagcattttaacttaatgcatacccggacagtggcgcaaaacgtggcgtttagcctgaaagcggctggctgggaacgcagcaaaatcgcgccgcgggtggcggaaattttaacgctggtgggccttgccgataaagcgaaccgttttccggtacagctcagcggcgggcaaaaacagcgggtggggatagcccgcgccatcgctaaccatccggatgttttgctgtgtgatgaaccgacttccgctctggatctggaaacttccgccacgattctggccctgctcagacagatcaacgcacagcttgggattactattgtgctgatcacccatgaaatgaacgtgatcaaatctatttgcgatcgcgtggcggtgatgtcgggcggtaaggttgtggaatcgggcgaggtgtttgatgtgtttgcccacccgcaacacgctttcacacagcaactggtgtctcatacccttaatttgaccctgccggaacgtttacgggaacacctgcccgggcagctgctgaaaattttgtttatcggcgattcggcggagcagccggtactgtcggaggtggcgatcaagtttggcgtcgcggtcaatatcctgcatggcaagattgagtatatcggcgaacgcgcgttgggcattctggtggtgcaattaaccgcgccgcataatccaacggcggtggccgccgccgtggagcatatccgtcaacgtactgcacaggtggaggtgatccgtggatgatttattgccggatttaacgctggcgttcaatgaaactttccagatgttgagtatttcaacggtgctggcgattcttggcggtctaccgctcggttttctgatttttgtcaccgatcgtcatctgttctggcagaaccgttttatttatctcgtcgcctcggttctggtgaatattatccgctcggtgccatttgttattttactggtgctgttactgccgctaacgcagcttttgctgggcaatacgataggcccgattgcagcctccgtcccgctgtcggtggccgcaatcgcgttttatgcacgcctggtagatagcgcgctccgtgaagtcgataaagggattattgaggcggcgctggcattcggcgctagtccgatgcgtattatctgtaccgtactgttgccggaagccagcgcagggctgctgcgcggcctgacgattacgctggtaagcttaatcggctactcggcgatggccgggattgtcggcggcggcggggtaggcgacctggcgattcgctatggctactaccgttacgaaaccgaagtgatggttgttaccgtagtggcgctgattgtgctggttcaggtcgttcagatgctgggcgactggctggcaaaacgtgccgacaagcgcgacagacactaagccggctcaatgtagcgtcagccggcaataaaagtaagctattgcgcttttagccagttggcaacgtcttgccatgtgccgcgaaaaacgatattcgcggcttttttctccagttgatagcgatacattgggtcgtaatattcgttaagtagcggaaccagccatgccatatggccgtcagtgctgccgctggataattgctctgccagcgccctatccagcgtgtccgtcagttcggcaaagcgttgcaaccccagacggcggcgaatagcgaacagtccatgatgaagatattcactatacgcctgccaaccggcttcatcgccgtaggcgtgggtgaagtcgtgatgcatacggatgaaatactcttcacgcagtcgttccagacgaagcgcaaacggatcttccactaccgcaatgggggcctgcgccattctttcgcgtaaacactcaggcagatggttggcgccgatcgttcgcccttcatcttccagtacccacctttttagcgtctgacgcgcgttaattttcagcaattcaacggcaagtttgttttcaaaactggcctggctgagctgggggttcagcgtgcggccaaaagaggagccgcgatgacgcgcgagaccttccagatccacgccgttgggctgttgtcgtaccagttgcgttttgccgctgcccgtacagccgccaattaaaagtatcggtttttgcgccagttgccaggtcgcctgaattgctgtctggcgcagcgctttatagccgccttcaataagcgggcagtcaatccctgtttcttgcagccaacgttgtacgatatgtgaccgctgaccgccgcgcgcgcagcacagatacccgttggggaaacgttgatacgcggctttccaggcctcaagccgctgctggcgaatgtcgccgcaaaccagccgatgccccagcgctaacgccgcatccgcgccctgacgtttgtagcaggtgccgacggcggctcgctcgtcatccatcatcaatggcaggttgatagcgcccggcatggcgccctgttcaaactcaatcggcgcgcgtacatcaattaaaggcgtatcggcaaggaggagcgcgcgatagtcctgtgctttttgtctgtcttgcataacgtaaaacgtaaccttaaatcatcctttgcgctattttacgcgccaattcgcaaagtggcttgatttttaacagcgtaccgtgttgaaaatggataaaaaaccggctatttcgggttgccgttgggtaaataatttcacaatgtcttctaccgctttgcctccgccaaatttatgccaggcgaggcttaacggtgagggcggacgcatcgtcgggatggtacagctcaccagttcgtttttgtcgatcagcgtttgacaaagcggctgcgggacaaaaccgataccgacgcctgccagatgagcggcgattttggtttccatatcaggcacgataatttccttctgccccggaaggcgccaggctacccgcttggtcagcgtacgcgcgctgtcttcgatattaattgccgggaaacggcgcaactgcgcttctgttagaggcccgctgacgtgagctaaaggatgatccgcggacatcacaaaacgccattgtacggaacctaaagggtcgagcataaaggtattagccaacggctcggtgccagttacgccaatcgccagcgaaaaaccttcatacaggagcgaatcccagacgcccatataaatttgccgggaaaagtgaaactgggtgaaagggtaacgcgcattaagccacgataagagactggcgaccgcttgcgggctatagagcaggttattcaccacaatattgacctgacgctctacgccgtcgttaacctggcgtagctcgtcaggcatgctgtccagccacgcaagccagtcttttgcctgagagagaaggtgagagcccgccgccgtcaacgagacgcttcgcgttgtgcgaaagaacagccctacgccggtattttcctccagcagtttgatgcggtagctaatggttgccgtggttttacacaggcgctccgccgctttggagaaactccccgtttcggcaacgctgataaaggtacgcagtgtttccgggtcaaacatcgtcagacgcctccttacgatcctgataaaaccagaattgttttcctatgatttttaagtagttttacataatagccatgtttgatttgtggtctaaatctacttttggaaaaatattccaacttttatgttgatgttaaatcccgaaggttttagattgcatggtattgaaaccggacagagtccaaaccgcggttaaacggaatcgagctacaagggaaaaataatgaaacttgaggtattaccgttagatcagaagacgttcagcgcttatggcgatgttattgagacgcaggaacgtgaattttttcatataaacaacgggttagttgagcgatatcacgacctggcgaaggttgaagttctggagcaggatcgcacgctgatcagtattaacagggcgcaaccggccgcgatgcctattgtggtacatgaactggaacgtcatcctttaggtacgcaggcgtttgtgccgatgaacggcgaggcttttgtcgttattgtcgcgctcggcgatgataaacccgatctctccacgctgcgggcgtttattagcaacggacggcagggcgtcaattatcaccgtaatgtatggcatcacccgctgtttgcgtggcagacggttaccgattttctgacggtggatcgcggtggcagcgataactgtgatgttgaaagtatcccgacacatgaactctgttttgcgtgacgctattggccttcttgcataagatgaacatattgttcattgtttatgctcatattttgggccggagttaacgtaaatatgacggaagtaagacgacgcggcaggccaggacaggcagagccgactgcgcagaaaggcgctcaggcgctggagaggggcatagcgatattgcaatatctcgaaagaagcggcggcagttcatcagttagcgatatttccggcagcctggatttaccgctttctacgacgtttcgcctgttaaaggtactgcaagcggctgattttgtgtaccaggatagccagcttggctggtggcatattggtttaggcgtatttaatgtgggctctgcgtatattcataatcgcgatgtcctctcggtagccgggccctttatgcaccgacttatgctgctttctggcgagacggtcaacgtagcgattcgcaacggtaatgaagcggtgttaatcggtcaaaaggagtgcaaatcgatggtcagaatgtgcgcgcccttagggagtcgtctgccgttacatgcttccggcgccggaaaagcgctgctttacccgctcaccgaagaagagctggtggggatcgtcgtcaataccggtttgcggcggtttacgccgaccactctggtggatttacctatcctgcttaaaaatctggagcaggcgcgtgaacagggctacaccgtcgaccaggaagaacatgttgtcgggctgaattgtatcgcctccgctatctatgacgatgcgggcagcgtggtcgccgctatctcgatatcgggaccggcttcccggctgacggaagatcgctttatcagccagggtgaactggtacgggataccgcgaaagacatcagtacggcgcttgggctaaaaccccctgtagcctgagccgcatcccgctcgctggagcgggacttttttaaaatttttaaaagttggaaactttttccaataaaaagaggtagcaataaaatggcaaaaatgagagccgtggatgcggcaatgtatgtgctggaaaaagaaggtatcaccacagcattcggcgttcctggggctgcaatcaaccccttctattctgcaatgcgtaagcatggaggcattcgccatatactggcgcgtcatgtggaaggcgcttcgcatatggctgagggctacacacgtgcggcggcaggtaatattggggtctgcctgggcacttccggcccggcgggaaccgacatgatcaccgcgctctattccgcttctgccgactccatcccgattttatgcattaccggccaggcgccacgagcgcgtctgcacaaggaagatttccaggcagtcgatattgaagcgattgcaaaaccagtcagcaagatggcagtgacggttcgtgaggcggcgctggtgccgcgcgtattacaacaggcttttcatctgatgcgctcaggccgcccaggtcctgtgctggttgatttaccgtttgatgtccaggttgcggagatcgaattcgatccggatatgtatgagccgttgccggtatataagccagccgccagccgcgtacagattgaaaaggcgctggagatgctgattcagtccgagcgtccggtaattgtcgcgggcggcggggttattaacgccgacgccgcgccactgctgcagcagtttgccgaactgaccaacgtaccggtgatccctaccctgatgggctggggctgtatcccggacgatcaccccttaatggcggggatggtcggcctgcaaacggcgcaccgctacggcaacgccactctgctggcatccgatatggtttttggcatcggtaaccgcttcgccaaccgtcatacggggtccgttgagaaatatactcaggggcgaaaaatcatccatatcgatattgaaccgacgcaaattggtcgcgtgttgtgcccggatctaggcatcgtttcggacgccaaagcggcgctaacgttgctgatcgatgtcgcgcaggagatgcaaaaggcggggcgtttgccatgccggaagacctgggtggacgaatgccagcagcgtaaacggactttgctgcgtaaaacccactttgacaacgtgccagtgaagccgcagcgcgtctatgaagagatgaacaaagcctttggtcgcgatgtgtgctatgtcaccaccattggattgtcgcaaatcgcggcagcgcagatgctgcatgtgtttaaagacagacactggatcaactgcggccaggcggggcctcttggctggacaatcccggcggcattaggggtttgtgctgccgatccgcaacgcaatgtggtggcgatttccggcgatttcgacttccagttcctgattgaagagttagccgtcggcgcgcagtttaacattccgtatatccatgtgctggttaacaacgcttatcttggtctgattcgccagtcgcaacgcgcatttgacatggactactgcgtacagcttgcctttgaaaatatcaactccagcgaagtgaatggctatggcgttgaccatgtaaaagtggcggaagggttaggctgtaaagcaattcgtgtctttaaaccggaagatattgcgcctgcatttgaacaagccaaagcgctaatggcgcaatatcgcgttccggtggtggtggaagtcattctggaacgcgtaaccaatatttccatgggcagcgaactggataacgtaaccgagtttgaagaggttgcggatagtgcgaaagatgcgccaacagaaacctgttttatgaaatatgagtaagggaggtaatcgatgttacgtttctctgccaatctttctatgctgtttacggaatatgatttcctggaacgctttgataaagcggcgttgtcgggatttcgcggcgtggaattcatgtttccctacgataacgacatcgaagtgttaaaacgtaagctcagggataataatctggaacatacgttacataatttacctgctggcgactgggcggctggcgaacgtggaattgcctgtattcctgggcgcgaagaagagtttcgcgatggcgtagcggccgcaatccgctatgcacgtgcgttaggcaataagaaaataaattgtctggtgggtaaaacgccgtcaggattctccgcaacggagatccacgacacgttggtcgaaaacctgcgctatgcggcaaatatgctggcgaaagaagacattttattacttatcgaacctattaatcactttgatatgccgggattccatctcaccggcactcaacaggcgttagcattaattaaggatatcggcagcgataatatcaaaattcagtatgatatttatcacatgcaacgcatggaaggggagttaacgcaaaccatgacggcatgggccgataaaataggccatttacagattgctgataacccgcgtcgcggcgagccggggaccggggaaattaattatgactttatttttaatgtcattaaacagtctggttatgatggctgggttggctgtgaatataaaccactgactaccacggaagcgggattatcgtggattaatcagtaccgttaaaacgcagaataattcgggcagcgcttttttttccactgtgttggaaggggattgtgttgcctgaatctggaaacaccgaaagcaataaaagaggttgtatatgaaactgggatttattggcctgggaattatgggctctccaatggctatcaatttggcacgcgccggtcatcaattacacgttacgactattggtccggtcgcggacgaactgctctcgctgggggcggtaaatgttgagactgcacgtcaggtaactgaatttgcagacattatcttcataatggtgccggatacaccgcaggttgaagacgtgttatttggcgaacacggttgcgctaaaacatcgcttcagggaaaaaccatcgtcgatatgagttctatttctcctatcgaaaccaaacgttttgcccagcgcgttaatgaaatgggcgctgattacctggatgccccggtttccgggggagaaatcggggcgcgtgaaggcactctgtcgattatggtcggcggcgagcagaaagtctttgaccgcgttaaaccgctctttgacatcctgggaaaaaatatcaccctggtgggcggcaatggggatgggcaaacctgtaaggtggctaaccaaattattgttgcgctgaatattgaagcggtttctgaagccttagtgtttgcttcaaaagcaggcgccgatccggtacgcgtgcgccaggcgttaatgggcgggttcgcctcttcacgcattctggaagttcacggcgagcgcatgatcaaccggacgttcgagcctggtttcaaaatcgcgcttcatcagaaagaccttaatcttgcattgcaaagcgcaaaagcgctggcgctgaatttaccgaatacggcgacctgccaggaattattcaatacctgtgcggcaaatggcgggagccagcttgaccattcggcaatggtacaggcgctggaattaatggccaatcataaattgtcctaattatgtgtatcgctgcggctgcagcgatacctgttcacaaggaacactctgtaaaggtgaagaacatgagtgaaactaaaaaatccggaattgattactggaaacaaattgttgtcgtaatgagtctgggctgggtagcgatttggatctatcgcaccgtgcttacgccaatttatccagaaattcaggcatctttagacaatgtaagtaatgctgaaataggcgccattgcaagtttttacttttttgcttactgcagtatgcaaatcccttgcggaatattggtcgataaattcggtcaaaaaatcatgctgatggccggatttacgctttttattattggtacactctgtatcgcgaaagccaatggcctgaccatgatctatatagggtcgctaatggcaggtggcggatgcgcttctttctttagctcggcttattcactctcttcggcaaacgtgccgcaggcccgtcgggcattagccaacgcaattatcaacagcgggtcggctatagggatggggattggcttaatcggttccagcatattagtaaaaaacatgagcatggcctggcaaaatgtactgtatatcgtggccgcgatattagtaatcatgctgtgcgtctttacgctgatcattcgcggtaaagccaaaagcgactctgcgcaagcggaaaagcaaacccaaaccgttacggaagatgagaaacgcgcgcctttattctctggtttattgtgtagcgtttacttcctctatttctgtacctgctacggttattatttgatagtgacctggctgccctcttatctccagactgaaagaggatttgatggcggagctatcgggctggcatcagcgctggtggcggtggttggcgtaccgggggcgttattttttagccatctgtcagataaattccgtaacagtaaagttaaggttattctcggtctggaaattgtggcggcagcaatgttggcgtttacggttttgtccccgaataccacgatgctgatggtcagcctgacgctatacggcttgctggggaaaatggcggtagacccgatcctgatctcctttgtatctgaacaggcttcggcaaaaagtctgggaagagctttcagcctttttaacttctttggcatgagttcagcggttgtcgccccaacgttgaccggatttatttcggatgtaacggggtcgaaagagatcagttttgtgatttcagcatgtttagtggtcaccggaacgctgatctttgctgtcgtcactttatataaaaagaaagcaacgcaacgtattgcttcagcttaaaaataattatatctactaattctttattttatatttatttgttcctcatagctaaacccataacaacgttatccgatgcgtgaaaagagggatttatggaacatcaaagagagctataccagcagcgcggttatagcgaagacttattacctaagacagaaacccaacgaaactggaaggcatttaactatttcaccttatggatgggatctgtacataacgtgccaaattacgttatggtcggcggtttttttatactggggctatcaacatttaatatcatgttggccattattatcagcgcattatttattgcggcggcgatggtaatgaatggcgcggcaggcagcaaatatggcgttccttttgctatgatattgcgaggttcttacggtgtccgcggcgcgctattccctggattattgcgagggggaatcgcggcaattatgtggttcggcttacagtgttacgcgggatcgctggcatttcttattttgattgggaagatctggccaggatttctgacattaggcggagatttcaagctgctgggtctttcactgccaggactaattacttttctaattttttggattattaacgttggcatcggttttggcggtggtaaagtattaaataaatttaccgctatcctcaatccatgtatttacattgtctttggcggcatggctatttgggcaatatcgctggtcggcattggcccgattctggactatctgccttcaggcgtgcaaaaagcagagcacagcggctttctgttcctggtggtgattaacgccgtagtcgccgtctgggctgcgccagcggtaagcgcgtccgatttcacgcaaaacgcgcattcatttcgcgctcaggcattgggacaaacattggggcttatcgtagcgtatatattattcgccgtagccagcgtgtgcattattgccggagccagtattcattatggtatggatacctggaacgtgctggatattgtgcagcgctgggacagcttgtttgcttcattctttgcggtgctggtgattctgatgacgacaatttcaaccaacgccaccggtaatattatacctgcggggtatcaaattgcggcgcttgccccgacaaagcttaactataaaaatggcgtaatgattgccagtattatcagtctactgatttgcccatggaaattaatggagaatcaggacagtatttatctgttcctcgatattatcggcggtatgcttggcccggtaatcggcgtaatgttagctcattattttgtggtaatgcgtggaaaaattaatcttgatgagctgtacaccgccagcggtgattacaaatattatgataatggatttaacctgactgcattttcagtcaccctagtcgcagtcattctgtcattaggcggcaagtttataccatttatggagcctttatcccgcgtgtcctggtttgtaggcgtaatagttgcgttcgttgcttatgcgctattgaagaaacgcacgggttttgaaaatacaggagagaaaaaactcgcaggttaaatattgaaaaagcattaagcgtatttaatgaagtgtgcgctatttaaaaactatctgtatccatacaaggagtttgttatgtcttttgatttaattattaagaacggtactgtcatcttagaaaacgaagcgagagttatcgatatcgccgtccagggcggaaaaatcgccgcgattggcgagaacctgggggaagcgaaaaatgtgctggatgcgacgggattgatcgtttcgccgggcatggttgacgcgcatacccacatttctgaaccgggccgtacccactgggaaggctatgaaaccggtacgcgcgcggcggcgaaaggcggtattaccacgatgattgagatgccgctcaatcagctgccggcgacggtcgatcgtgagacgattgaactcaagtttgacgcggcaaaaggtaaattgaccatcgacgccgcgcagttgggcggtttggtctcttataacctggatcggctgcatgagctggacgaagtgggcgttgtcggcttcaagtgctttgtcgccacctgcggcgatcgtggcatcgataatgattttcgcgacgttaatgactggcagttttacaaaggcgcgcaaaaactgggagagatggaccagacggtactggtacattgcgaaaatgctctgatttgcgatgagctgggcgaagaagctaaacgcgaaggtcgcgtaacggcgcatgattatgtcgcctcacgtccggtatttactgaagtggaagccattcgtcgcgtgctgtatctggcgaaagcggcaggttgccgtctgcacgtttgtcatatcagcagcccggagggggtagaggaagtaacgcgtgcgcgtcaggaaggccaggatgtcacctgtgaatcgtgcccgcactattttgtcctcgataccgatcagttcgaagagattggcaccctggcaaaatgttctccgccaattcgcgaccaggaaaaccagaaagggatgtgggaaaaactgtttaacggcgaaatcgactgcctggtatccgaccactctccatgccctccggaaatgaaagcaggcaatatcatgcaagcatggggcggaattgccggactgcaaaactgcatggacgtcatgtttgatgaagcggtgcaaaaacgcggtatgtcgttgccgatgtttggcaaattaatggcgaccaacgccgccgatatttttggtctgaaacataaaggacgtattgcccccggcaaagatgctgacctggtctttattcagcctgacagcagctatgttctgaaaaatgaagatctggaatatcgccataaagtcagtccgtatgttggccgtactattggcgcgcgtattaccaaaacgattttgcgcggcgatgttatttatgacatcgagcatggcttccctgtgccgccaaaaggtcagtttatccttaaacatcagcagtaatccggtgtgatttaatgcccgtcgtcacgacgggcattctctattttaaggtgtggatatgttccctgttattaaccgcgaaagtgtgttgtccggctttcagtggtttttctttattttctgtaacactgttgtggttccccctaccttgctatccgcttttcatcttcccgctgataacctgttaatgctcacacaatacgcttttttgaccaccgcgttggcctgcctggttcaggcattttgcggccatcgccgtgccattatggaagggccgacagggctgtggtggggcgctattcttacgattacgcttggcgaggcgtctcgcggcacgccgctgaacgatatcgcctccagcctgtcggtcgggatcgcgatctccgcaatggtgacgatatttatcggcattagcgggttaggacaccgtctggctcgcctgtttacgccggcggtaatggtttttttcatgctgcttttgggcgcgcagctgacctcaatattttttaaaggcatgctggggctgccttttggcattgccgataccagcgccagaatcaaattggccccctttgggctggcggtcgcggtgatgtgttttatcctcgcgatgattattttcctgcaacagcgtatctcccgttacgcgttactggtagggaccgtggtcgggtgggggctatggcggttatgctttccttcatcacacttaccgccgggtgaattaagctggcgatggtttcctctgggcagccacggcacgctgatgccgggtattattgtgacggcggtgatgacggggttagtcaacatcagcaacacttacggcgccatccgcggtaccgatatcttttatctgcatcaagggtcgggcagttctcgttatcgccgaagctttatgatttccggactgatgacgttagtgacggtgcctttcgcggtcgtgcctttttcgccttttgtatcttccattggtttattaacgcaaaccggcgacagttctcgcaaatcctttatctgcggtagcgcgctgtgtctgctggttgccattataacgccgttaacccgcttattttgcgctattccactggcgatcagcagcgccgttatgctggtctcttatttacctttactttattccggtttggtttttagccagcaaattacgtttaccgcgcggaatatttatcgcctggcattaccgctttttgtcggcatttttttgatggggcttcctccggtctatttacaggatcttccactgatgattcgtcctctgcttagtaacggattactggtgggaatcttactggcagtgcttatggaaaatcttattccgtgggaacgcattaaataacatgagaaaacaaggagacatgatgaagattgtaattgcgccagattcatttaaagagagcttaagcgctgataaatgctgtcaggctattaaagcgggattttcaaccgtatttcctgatgcgcgctatgtctgtttaccgatcgccgatggtggagaaggaaccgtggacgcgatggtggcagcgaccggcgggaaacgggtttctgtggacgttagcgggccgatgggggaaaaagtaaacggattttatggcctgaccggcgacggcaaaacggcgattattgaaatggcggcggcgagcggattgatgctggtggcgcccgaggcgcgtaatccgctgctggcatccagtttcggcaccggcgaattgattcgtcacgccctggacgcggggattcgccatattattctgggtatcggcggcagcgccacggtggatggcggaatgggagtagcgcaggcgctcggtgtgcgttttctggacgcgcaaggaacgccgcttggcgccggagggggcaatttatcgcgcctggcgagcattgacctgcaggggtgcgatccgcgaatttcagagtgtcgtattgaggtcgcctgtgatgttgataacccgttggtggggccacgcggcgcggcggcggtattcggtccgcagaaaggggcgacgcctgaaatggttgagacgctggaaaatggattacgtaattatgcccgtgttttacatgccctgaccggacgcgacatgtctcaaataccgggcggtggagcggccggaggaatggggattgccgctatcgtcttcctggaagcggaaatgaagcccggtattgagattgttatgcaggcggtgaagctggaggaggcggtaaaagaggcctcgctggtgattaccggagaagggcgaatcgactcgcaaacggcgggaggaaaagcgccgataggcgtcgcgtcagtggcgaaacggcatcatgtcccggttatcggcattgccggcgtactgggcgacggcgtggaagtggtccatcgccacggtattgatgccgtattcagtattttgccgcggctggcgcctttgccggaagttctggcgaacggtgaacaaaatctctaccacagcgcctgtaatattgcccgcgtcatcaaacttggccaggacatcgggactcgttaagcataaaaaaagccacggttctcaccgtggcaaaatccaacatagctaaattaaaaataatcaggagggctgcccgccgttaaatcataacgtcgcggttacagtctttggagtagatgtagctgaatgcttcgccacgacctacaccgtatccggcctgcagggaataagcacccatgaagatgtagtcgccttttttcaccggcacccagttgttgtcgaggttataaaccccctggccggaaaggatataagcgccatgttcctggacgtgggtttcaatatagccgtggctggcgcccggttcgaacgacagaatatgcatattcatatcgaagcccagctctttaggcaggaaatccagcagaataacatcttccatgccttcataatgaatacgctccagctggctggcattgccggaaaccaaccacggggcatgcccctcgacaggagtatagcggcgtttatataaaaatagctggctgtcttccgtttgagcgttgctaaaggtcatcatctcgcccggtggacaatagaggtatccgccctgggttaaagagaatgtttttccttctgctttagcttcaatatttcccgcaatgacatagagaaaagtttcaatcccctcgccgccaaagccctgctggttgccgccattctgatgtaaggtgaccagataatcgacgaaagaagcacccagcttcggcgtcgaaaggatggtgacgtcacagttttcaaagccgggaataatatttttcaccagaccgtccggcgttaagagcgcatagttaccgtgtttcacaatggcgcggttcgccagtaaatcatcgcggtaacccgtgacgttattcagatatcccattgatggctccttatttttgccaggcaagttgatgcagcattaatgccagagttttgaccccttcagcaaggtcattaatgttggtacgttccgccgggttatggctgataccattaatgctggggacgaaaatcatacaggtagggacgcgcggcgcgaaaatttgcgcgtcatgacctgcgccgctatgcattatgcgatagttcagttgttcggtttcacacagcctggtgagggccgcgaccagttcggcgttcatcggcaccggcgcttcgtccatccacaaatcgatatcgatgctgatatccatttcatcgcagatggcgcgcatatcgttttccaactgttcggtaaattcgcgaagtacggcggcgtccgtatgccggcaatcgattgtaaatgtggtttttccagggactacattgaccgtattcggctgcggctcaactttgccgaacgttaataccaggggatcgccatgctgtttggctttttcaatggactgactgcaaatacgactgaaggcgtgcaccgtatcgcgacgatagcccattggcgttgtgcctgcatggttggactcgccgttgagcgtcaccgtgtagcgacgttgcccgacgatggcgttgacgacgccaatcgactgtccgttgctctccagaacgcagccttgctcaatatgcaattcaacaaaggcgcggatatcggttcgcgcagcgagcggcgcggcgggaagggtaaatccgcacgcctgcatagcgtcgacaaagcctgtgcctttggcgtcctggatatggcgtacctcttcaggattcgccaggccaaaaatgttcttgctgccccaaaaaacgtaagggaaacggctgccttcttcctcagccattgacactacctcgacggtgcgcagcggcgcgccgtaggtcgcttttagccagtcgagcgccagccaggcggcaagcgcgccgaattgcccgtccagattgccgccgttgacgaccgtatcaatatgcgaaccgcttaaaatcacctgctccggaaattgtgtgccgcaaaggcggccatataaatttccgacgtcatcaaagcgtgtctccagaccgctttctgccattcgctttttaaactgctgctgtgtttccagccactcaggcgaataaagtaaacgcgtcattccgcctgtaggatcggctccaatggaagagagccagggcaatgtttcttctatcgcgtggcgaaaatgctttatcatagaaaattcctgtttcaataattattgggcaaagggattttttgtttcgtatgacttgagatagagggcatcggaaatcagatattgataaatatcatcaacaatatcgataccattcatatcggcatttttctgtttaatatcctgatcctgtccaggataataaacctgtttaaaaccgggggcgggcttcacggcattgagttcctgcatggtctgactaatatgtttgcggaataattcacaggaagaaaagaacgccggattaatgaccagatgaagttgtcctaaattgcgtccggcgtgtaaatcttcatacatcgaactgacctggcggccaaacggcagccccagcagaataccggacagaatatcgatcatcatcatcaggccgtaacctttcgggcctgcggcgggtaataacgcattgacggcaaaaggatcatgtgtcggcgcgccatttttatcaacggcccaactctccggaatggactcattgcgggaccgtgcatcgaggacttttccccaggcctgcacggtggtggccatatcaaaggtaatgatgtcatcgccttcgcccggcgcggcaaaggccagcggattagtgccatagtaaatatccgccccgccaaacggcacgaccataggatcggactgacagatagacagaccaatcaggccttcgcgagcagcctggcggacgaaataagagatggcgccgctatggcccattctgctaatgccgacaaccgcgacgccattttttttggctatttcaatagcatgctccattcccattttggctgcgacctgtccggcagcattatcggcatgcagtatcgccgtacagggaccggtattctcaatgcggaacgtcggctcccggttggtgccgccttttgaaattcgttcggcataatattcaacgcgtacggcgccatgtgagtgaatacctctggcatctgcataaaccagtacgtcggcgacgatggcggcgtgctcacgttttagtccggctttataaagcttattttcgataagctgatggagtgtttcccgactgattttcatctgtcttcctttttaacgacggtgtgaagcatgactgcgattaacataccgggaaaataaaatgattatgtgatccagacaggcaaaaaaatataattagaatttatttgataatcaggcgggttttatctttttgcttaaataaaaagcttttttagaaaatcataactaatcctttagccgttgtttgaattcttttgttaataaatttgatgtgacgttaatcactctatttaccctcccggatatataccgtgaagcgcacattaacactgctcgtgcaattgcaatgggtgcaattgcaatgggtgcaattattaaggagttgttatgatccacgcctttattaaaaaagggtgttttcaggactctgtcagcttaatgattatttctcgaaagctgagtgagtccgaaaatgttgatgatgtatcggtaatgatgggaacgcctgcgaataagtcgctgctggaaactaccggtttctggcatgacgattttcatggcgctacgcccaatgacatttgcgtggcgattcgtaccgaagcggtagatgacggcattacgcaagtgattgtgcaacagctcgaagaagcattgcagcagttggcgcagggaagcagcggcagccagtcgttaatccaggtcagacgctgggaaagcgcctgtcagaaactgccagaggcgagtctggcgctggtatcggtggccggcgaatatgcggcggaactggcagagcaggcgctggatcgttcgttgaacgtgatgatcttctccgataatgtcacgctggacgatgaaatcagactaaaacgccgggcgcgtgataaaggactgctggtcatggggccggattgcggcaccgctatgatcgccaatacgccgctggctttcgctaacgtcatgccagagggcaacatcggggtgattggcgcttccggcaccggtattcaggagctctgttcacagattgcgctggcgggggaagggattacccatgccatcgggcttggcggacgcgatttgagcgccgaagtcggcgggatcagcgcgctaacggcactggagatactcagcgcggatgaaaagagccaggtgctggcctttgtctccaaaccgcctgccgatgcggttcgtcagcatattatcgcggcgatgaaagccgccgggaaacccgttgtagcgctgttcttagggttttcctcccccgttgcgcgtgaggaaaacgtctggtttgcctcgacgctggatgaagccgcccgactggcatgtttattgtctcgcgtgacgtcgcagcgtaaagaaatggtttcaacaggcggcgtgattcgtggtctctataccggcggaacgctggcggcggaagcggcggggctgctggccggctatctgggcgtcgcggcggatacggaacatcaccatggcatgatgcttgacgctgacggccaccagattatcgatctgggcgatgacttttataccgttgggcgaccacatccgatgattgacccggcgttacgtaatcagcttatcgccgggcttggcgcacagccgcaggtacgcgtgttattagtggacgtcgttattggttttggcgcgaccgccgatcccgccgcatcgctgattcaggcctggcagaaggcatgcgacgcacgcgccagagaccagccgctgttcgccatcgcaaccgtcaccggaacggaacgcgatcctcagtgccgctcgcaacaaatcgccgcgctcgaagatgccggcatcacggtagtggattcccttcccgaagccactctgttggccgcggaactgattcgacccactctctcttctactcatccatcagccccccggttactggaagcggtggcggtgattaatgccgggttacgtagcttcgcgctggatttacaggctgccggtatgcccgtggtgcactaccagtgggcgcctgtcgctggcggtaataaaaaactggctcgtctgttagaacgtttgcaataaggggttcccatgtttacatcagtggcgcaagccaacgctgcagtcatcgaacaaattcgtcgcgcacgtccgcactggctggatgtgaagccagcttcttcattaattagcgtgctcaatcaagggaaaacgcttcttcatgccggcccgccgatgcgctggcaagagatgaccggcccgatgaaaggcgcctgtatcggcgcatgcctgtttgaaggatgggccaaagatgaaatgagcgcgctcgcgctgttagagcagggaaaggtcaactttattccctgccatcacgttaacgccgtggggccgatgggcggtattacgtcagccagtatgccgatgctggtcgtggaaaatatcaccgacggcaatcgcgcgtactgcaatctcaacgaagggatcggcaaagtgatgcgtttcggcgcctatggcgaggatgttcagcaacgtttgcgctggatgcgcgatgtgctgatgccggtattaagcgcggcgctgggacgtctggagcgggggctcgacctgaccgcaatgatggcgcagggcattacgatgggagatgaattccaccagcgcaatatcgcctcttccgcattgctgatgcgcacgttggcgccgcatatcgcccgtctggaacacgataagcagcagatagcggaagtgatggattttctgagcgtcaccgatcaattcttccttaatctggcgatggcctactgtaaagccgccatggacgcgggcgcgcagattcgcgccggcagtattgtgacggcgatgacccgcaatggcgatatgtttggcattcgggttagcggtctgggcgaccgttggttcaccgcgcctgttaatacgccacaggggctattttttaccggtttttcgcaggatcaggccaacccggacatgggcgacagcgccattactgaaacgtttggtattggcggcgctgcgatgattgccgcgcctggcgtaacgcgttttgttggtgccgggggaatggaagcggcgaaatctgtttctgaagagatggctgaaatttatctcgaacgcaacatgcagctacaaatccccggctgggattttcagggggcctgtctgggactggatatccgccgcgtggtcgagaccggaattacgccgctgattaacacgggtatcgcgcataaagaggcggggattggccagattggcgcgggaaccgtccgtgcgccgctggcctgtttcgagcaggcgctggaagcgctggcggaaagcatgggcgtaagttaagagagcgtctcatgaaacgtatccatcctcttatggcaagccgacaatcggcggattatcggcaaccctggcagatgtcaggggtatggcgtcgctctattaattttgtggcgaaaagcggtgagttattaacgcttcaccgtcgggggagcggcttcagtccgggagggtggatactgcgcggcggcgattttgacgccttgcgcgatgtgctcaccgatggcgaaaaaccgcagtcaaccgctgccggtattcagattggcgagtttcttttatgcgagccggagaggcgctgttcgctgcgggttccacgctatcttgcgtcgccgcgtcttaacgcgacgtacatgcagcgtagtgaggagacggggctgtttgggccgttaaccgtcgccgcagctcagcctctatgtccggaacttcgccagttttgtcactgctttcagtcggcgcttgcaggtgctgcgactgactggcggctatggctgggtaaagggccgggcttaacgcccagtcatgacgacacgctgacgggaatgttgctggcggcctggtattttggcgccatagatgaacgcgccgggcgtaatttttttgcccaatccggcagccttgatcgggcgacgacgctcgtgagcgtcagctatttacgctatgcggctatggggtatttcgcgtcgcctttactccactttattcatgcgctgcgacgagatgctcgcacagaaacggcgattgacggactgctggcgctggggcacacctctggtgcggatacgctgctggggttctggcttggacaacaaatagtaaaaggatagggaatgaaaacgttggtagttgctcttggcggcaacgcattattgcagcgcggagaagcgctaacggcagagaatcaatatcgcaatattgccgacgcagtgcctgcgctggcgcgacttgcccgctcgtatcggctggcgatagtacatggcaacggcccccaggtcggcctgttggctttacagaaccttgcctggaaagccgttgagccttatccgctggatgtgctggtggcggagagtcagggcatgatcggctatatgctggcgcaacgtctggcgcttgaacccgatatgccgccggtgactgcggtattaacgcgaataaaggtatcggcggacgatcctgcttttcttgaaccggaaaagtttatcggtcccgtttattcgccagaagagcaaatggcgctggaagcgacttatggctggcatatgaaacgtgatggaaaatatctgcgccgtgtcgtcgcttccccggcgccgcgtcagattatcgaaagcgccgctattgagttattgctaaaagagggccatgtggtgatttgcagcggcggtggcggggtacctgttgccggcgaaggcgaaggggtcgaggcggtgatagataaagacctggcggcggcattgctggcggagcagatagcggccgatggtctgatcattttgacggatgcggatgcggtgtatgaacattgggggacgccgcagcagcgcgctattcgtcaggcttcgcccgatgagctggcgccgtttgccaaagccgatggcgcgatgggaccgaaggtgaccgcggtaagcgggtatgtgaagcggtgcggaaagccggcatggattggcgcgctgtcgcgtattgatgataccctggcgggcagggcgggaacctgcatctgtctgtgatcgcgacgggcggcaacagagaatgcgccgcccacgctgtttatttaagcttactttgcgcccagataatgccgctggcgtattcgcctggcaggagcggagagagcgcttccagggtggcgctaagacgtgacgtatcgctgtcggtcagattcagatggccgacttttcgccccggacgtaccgctttatcataccagtgcagatgtaccagcggcagcttcagccagtcgtaattcagctcgctgccgatcaggttgatcatcaccgacggggcgttaatcaccggcgcgggcaacggcaggccggtaatcgcgcgcaaatgcaattcaaactgactgatgctggcgccattttgcgtccagtgtccgctgttatgcacgcgcggcgccagttcattgattaacaggccttccggcgtgataaaacattccatcgccattacgccgacgtagttcagcgcctgcataattgctgacagcatcgattccgcctgctcctgctgttcggcgttcgcctgtgggaacgcgacgctggtccgcaagatgccgtcctgatgcaaattgtgcgttagcgggtaaaacacggtactgccgtcatgagcgcgcgcgccgactaacgacacttcgccggaaaaatggataccgcgctcaacaatacattcgccatagcagtcatccggcagttgcccggtttcgtccgcgcgtagacgccactgcccgcgaccgtcgtagccgccaacgcgacgcttaataatcgccagttcgcccaggcggtcaaagatgccggaccactcgtcggtgctggtcagcagctgccacggcgcggtcgcgagtcccagtttatcgaaaagctgtttttgtgtcagacggtcggcgatgatcggaaatacatcgcgattgacgaaggccgggtggcgcgccagctcgcgggtaagcgcggtttccggccagcgctcaatctctgcggtaatgacgctctgctgtaccggcacggcggtaggctctgcatccagaccaaccggccagacggcgatacccagcggttcgcccgcctggcgcagcattcggcccagttgtccgttgccgagaacgcaaacttgcttcatagcgtcccccgcggatcgggattttccagaacttcatcggtttgcgctttgcgccagtcggcaatgcgctgatgcagttccgcgtcgtgttgcgccagaatctgcgcggcgagcagggcggcgttagcggcaccggctttaccgatcgccagcgtacccaccggaatgccgcgcggcatctgcacgatggagtagaggctatccacgccgcttagcgcagcgctttgtaccggcacgccgagtaccgggaccagcgtttttgccgcaatcattcccggcaggtgcgccgcgccgcccgcgccggcaataatcacttgatatccgttctcttccgccgtttcggcgaagctgaacagtttatcgggggtgcgatgagcggaaaccacttctacatggtgcgggacatccagaatttcaaaaatttcggcggcgaattgcatggtagcccagtcgcttttggaccccatcacgatggcgacacgcgccggattattgcgggaagacatgcgtcttaaaactcctgtggtgcgggacacgctgcttttgaggtgtcagagaatagcatgataatcaggcaaggaaaacggttgcgtgcgcgccgtaacggacgattcgacgaacatttacagggggaaggcgattaactcaacgttgtccggcgtgacttttaccattgaaccttcatgatgccatgcgcctaacaccacgcggaatgcgggctggtcgttggcggaaagttcatgcaccgccgggcggtgggtgtgaccgtgaatcagccactgtacgcggtgtttttccatttcggcgacgacggtctgcgcattgacgtccataatatccagcgatttgctgctgttggcggctttactgccggcgcgcattctggcggcgatacggcggcggataaacagcggcagggtaaggaacagtcgttgcacccacggattatggactttggcgcgaaacgcctgatatccggcatcatcggtacagagcgtatcgccgtgcataatcaacacattgcggccatacaggtcgagcactttttcctgcggcagtagaatcatgccgctttcgcgggcaaagcgtttgccaatcaggaagtcgcgattaccatgaataaagaagcaggggacgccggaatcaaccagcgatttaatggcaacggccatttcacgatgtagcgggttggggtcgtcgtcgccaatccaggcctcgaagagatcgccaagaatatacagcgcgtcggcctgacgggcttctacggctaaaaaacgcagaaaaccggcgacgatcgccggttcttccgtttgcagatgcaagtctgcaataaacagtgtcgccacgattactcgctgacggtcacgttttcaatgatgacgtcttcttttggtacgtcctggtgcataccgctacggccagtggcgacgcctttgattttatctaccacgtccataccttctacgacttccgcaaagacgcagtagccccagccctgcagactttcgccggagaagttcaggaagtcgttgtctgccacgttgatgaagaattgcgcggtagccgagtgtggtgcctgagtacgcgccatcgccagcgtaccacgggtatttttcagaccattgttggcttcgtttttgatcgcctctttggtggctttctgtttcatgcccggctcaaagccgccgccctgaatcataaaaccgttaatcacacggtggaaaatggtgttgttgtaaaaaccttcgcggcagtagtccaggaagtttttaactgtttcaggcgctttatcatcaaaggttttgattacgatatcgccgtgattagtgtggaaagtaaccatttttgcatcctgttccaagagagtggtgctttagcccgcaatggggcacatataggggcttgttatagcataaccgtaagctgcgatcaccttgcaaagtgtgctgcttcgattacgaataatatgtatcatacggagattattacccacacacgtctatacggaatcttcgatgttaaaaatttttaatacactgacacgccaaaaagaggaattcaaacccattcatgccggggaagtcggcatgtacgtgtgtggtatcaccgtttacgatctctgccacattggccacggacgcacgtttgtcgcttttgacgttgtcgcgcgctatttgcgttttctcggttataagctgaagtatgtgcgtaacattaccgatatcgacgataaaattattaaacgcgccaatgaaaacggcgaaagttttgtcgcgctggtcgacagaatgattgcggaaatgcatcaggacttcgatgcgctgaatattctgcgtccggacagcgagccgcgtgcgacgcaccatattcaggaaattatcgagctcacccgaaccttaatcgagaaagggcacgcctatgtggcggataacggcgatgtgatgttcgatgtaccgaccgatccgacttatgggcagctttcccgtcaggatcttgagcagcttcaggcgggcgcgcgcgtagatgtcgttgacgtgaagcgtaacccgatggacttcgtgctgtggaaaatgtcgaaagagggcgagccgagctggccgtcgccgtggggcgaagggcgtccgggctggcacattgaatgttcggcgatgaactgcaagcagttgggcaaccattttgatattcacggcggcggttccgatctgatgttcccgcaccatgaaaacgagattgcccagtctacctgcgcgcatgacggcgaatacgtcaactactggatgcactccggtatggtgatggtggatcgcgagaagatgtccaaatcgctgggcaacttctttaccgtgcgcgacgtgctgaaatactacgatgcggaaaccgtgcgctacttcctgatgtccgggcattaccgtagccaactgaactacagcgaagagaacctcaagcaggcgcgcgcctcgctggagcggctatacactgcattgcgtggaacggataaatcagcggccccggcgggcggcgaggcgtttgaagcgcgtttcgtggaggcgatgaatgacgatttcaataccccggaagcctactccgtcctgtttgatatggcgcgtgaagtcaaccgtctgaagggcgaagatatgaccgccgcgaatgcgatggcgtctcatctgcggaagatttccggcgtgctgggactgctggagcaggagccggatgttttcctgcaaagcggcgcgcaggcggatgacggtgaagttgcggaaattgaagccttgattcaacagcgtctggatgcccgtaaagcgaaagactgggcggcggcggacgcggcgcgcgatcgtctcgctgaaatgggtattattctggaagatggcccgcagggcaccacctggcgacgtaagtaagcgcttttacaggccgctctatttgcatagaacggcctgttttttattttttcgcaccgggcgaaagataaacacacaccgactcccccagattctgatgttcacacccgggtattgcccggctgtaatgggcaataaagcggatgacgctgtcgccgctgtttagccccacatttccttttcgcagcaattctgctggctgatcgtcggtgaaaacgttaggggtgaacagttttgcgcctaatcgttcaaaagtgccagcactaacgatagagggttgataaccctgaagctgcaaccagcggcgggcatcattacgtgaccaaacctgcgcatcgtttgctcgcgcaaacacttcgagaagccagccattcgaattctgataagggccggaaaaaggccacgcaattaggttatagcggggactgtggaagagattgagtttgatagcgctatgtaagagcgtttgtaatgccgtcgcgatatctgaacgcgggcgcaaaacggcaatgctctgattcaccaggtcatcagccagaaactcatacagaccttgtatatagagcgctgattcagcggttccgcaagtattcagattatggtaaacccgccagtctccgtttggctggcgcatggcatagccagcatgtgaccaggttaaatgtcggctcgacatatcttgcccctggcgaaccagaatgacgaccggatcgggttgactgttaagctgttgtttgagctgtagcgcctgatccattgtcgctgcgatgctctccggcgtgtttgctttttggtgacagttagcactgtctgcataagcgttgagcgagattgcgctgagccacagggcaaacgcgaaccgcttcatttggccggtaccgtctggttgctggaaagtcctgcgtcgtcctgatttaccatatgggcaaggactttgccctcttttttcaaataagcgccggtgccttcctgcgttttttccagagtgactttatcacctgctttgaggttgccttctttgacgacatgtagcggaacttgcattttaatgtctttgttatcgggggacttagtggttaacagcgcggttttttgctttttattttcgacaacagatccaatgctcaggttgagcggcagcagtacgggggagagtataattccgctaaccagtgcggaactgcccacgctgacaaccgcagacgatgccgcataccagccagtggcagacatttcttcgctatagctggcgtgggaaaatgagaaacagatgaccgcggcggcgaatgtcattttattcatattgattccttttaatatgcgttttaagtacccatagaaataacactaaaatacttcccggcaaccacacccacagcaattctgagagaatgacctggtgtccatacggcgtgatgtagcttgaaagcgcgaacggcgcgactttaatcacctgccagggcgcaaaaaaacgttcatctgaccacggccacagccagccaacgcctttcccacccgtggttatcgaatccagcaggctgtgcgacaacaatgaaacggttaaaaacagccagcagcgcacctgcccagctcgaaaccatcgtcgtcccgcgagtacgcacaacagggggaggacgaatgcgaaaagtaaagagtgggtaaatccgcgatggccaaatacgttgccgtaggcgacgccaaatttaaaggccagcacgtcggcatcggggagcatcgccagcacaacaccggcaaacagcaggcgaggagggataactttcaggcctaagcctgcgccaaaacacaggggaacggcggcgtgggtgataacggtaggcatagcgatcgttcacagggaaatagccatgctagcagttggaacgcagaggattaagtggatgattatctgaaaagacagcgtaatcaggccggataagacgctttgcgtcgctatccggcactctgtatcaggccacgacgttcacactttggccttcaaagctaacggtttgcccggcgacaattttgcagcgtttacgcgtttcaaccgcgccatcaaccttcaccaacccgtcggcaatggcgattttcgcctgcgcgccgctttcgctccagccttccagcttgagcagatcgcacagctcgacgtgcgggtgcttgcctaaagagaatgtcgccatattattttccttgtggatcgtgatattcaatgcacgcctgcagcgtgttttcgataagcgtggcgaccgtcatcgggccgacgccgcccggtactggcgtgatgtatgacgcgcgcgccgcggcttcgtcaaacacgacgtcgccaacgaccttgccattttccagacggttaataccgacatcaatcacaattgcgccttctttaatccattcgccgggaataaagcccggtttacctacggcgacaatgagcaaatcagcatgctcgacatggtgacgcagatctttggtaaagcggtgcgtaacggtagtcgtacagccagccagcaacagctccatgctcattgggcgtccaacgatattggacgcgccaatgaccaccgcattcaggccgtaggtatcaatattgtaacgctcaagcagcgtcacaataccgcggggcgtacagggacgcaggcgtggcgcacgctgacacagacgaccgacattataaggatggaaaccgtctacgtctttatctggcgcgatacgctccagcactttaacgttgtcgatacctgccggtaaaggcaactgcaccagaataccgtcaatcgtgttatctgcattcagagtatcgataagcgccagcagttcggcttcgctggtggtttctggcaggtcataggagcgggagacgaaccccacttcgtcgcacgctttacgtttgcttgcgacataaatctgtgaggccggattgctgccgaccaacaccacagccaggccgggagcgcgaagacctgctgcgacgcgtgcctgaactttttgagcaacctcagatcgcacctgctgcgcaatcgttttaccgtcaataatctttgctgccatcagagagaagattccatctgttacttcaagtcaaaggggatgacgctattttgtcagaagcgggcctcgctgtcagttaacgtttgtgtttccgatgcaaacgcgacgtctcccccgtctgttgacgatactgagacgtggcccgtaagcgcgccatgattaaccaaaaagaaacaattcatcaccctggctatggttaccgtaatccctcgtcgttaatagcatcgggcggcataatgcgacattttatacaaaataagattagacccttcttatatcccaataagaattagcttaggtcattaaaagagtttgcggctattttttatttagcgaaatgtttaatttattaccgtgacgaaatgtcatattcgcaaagattaattactgcgtctgatactcaggggagaaacagaaaactaattaatctgcgatatctatctttacaggatgcagagataacttttctgacatgctatgtcgataataattcaaacggagccgacaggatgccgaaaccgggtgtgtgtaattcaagggaaatccatgaaacataaattaatgacctctactattgcgagtctgatgtttgtcgctggcgcagcggttgcggctgatcctactccggtgagcgtgagtggcggtactattcatttcgaaggtaaactggttaatgcagcctgtgccgtcagcactaaatccgccgatcaaacggtgacgctgggtcaataccgtaccgccagctttacggcgattggtaatacgactgcgcaggtgcctttctccatcgtcctgaatgactgcgatccgaaagtggcggccaacgctgccgtggctttctctggtcaggcagataacaccaaccctaatttgctggctgtctcctctgcggacaatagcactaccgcaaccggcgtcgggattgagattcttgataatacctcttcaccgttgaagccggacggcgcgaccttctcggcgaagcagtcgctggttgaaggcaccaatacgctgcgttttaccgcacgctataaggcaaccgccgccgccacgacgccaggccaggctaatgccgacgccacctttatcatgaaatacgaataatcccgtcagggaacgccagggaagggaggcgcctcaacggaagaggctatcggggataaatagagaacatagcagatgataaggaaaggcgcggcgctagcggggcttgttttgatgtcgcccgtcattgcgcagccggtaatggtggagagcgggcgtgttcacctgcgcggacaactggtcaatggcggctgcgctgtcgccacagaaagccagaatttgcgcgtattgatgggacagtaccgcacgaatgcgtttaccggtcctggcagcttcgctcccgtcagcgttccattttcgttacggttaatctcctgtagcgcggaggtctggcgtcatgtcggcattgcgtttgccggcgttacgcctgcggaagatccccatgtttttctggccagcggcgagggtatcggtaatgccggaatcggcctggcattatttgatgaccagcagcggcaaatcatacctaacacgttaccgcttcattacacgcccattttaacgtcagaaatgactttgcattttactgcccgctatcgggcaatttcagaaaatatgacgccgggacgaattcattcagaagtgtggtttacgctggtttacccatgaattttcttgccgacgtgactcaatgcaaaaggtattttttaccatgctgaatagtataaaagtaggctttattgttcttctcacgttatttacttcgctgaacgtacaggcggcgggggggattgcattaggcgccacgcgcgttatttatccctcggcggcgaagcagacttctctggcaatcagtaatagcgatactcaagaacgttacctcgtcaattcatggatcgaaaataacgctgggcagaaagaaaaaacgtttatcgttacgccgcctttattcgtcagcgagcccaaaagtgaaaacacgctgcgtattatctacgccgggcaaccgctacccggggatcgggagtcgttattctggatgaacgtgaaagccatcccgtcggtcgataaaagtcatattgaaggaaaaaacgttctgcaactggcgattctgtcgcgcatcaaactgttcgtgcgtccggcgaatttgccgcagacgccggaagacgcgccgaccttgctgaaattttcccgtgtcggcaaccatctcaagataaccaacccatctgcttattacctcacgctggtcaatatcagcgtgggcgcgaaaaagattgataacgtgatgatcgcgccaaaaagcgacatgcaaattcccttaccgactggcgcgcagggcaacgtgacatttcagtccgtcaatgattacggcgcattgacgtcggcgacaacggccagtctcggttaagcagagagcgtgaagccacacgagaacacgatgaagaagacaacctggtttgcagggcgatttcccggctatgtatcaccgttaagcagcgtggcgctgtcggtgctggcggcgctgtgtccgctgacgagccgcggcgaaagttatttcaaccctgcgtttttgtcggcggataccgcgtccgtggcggatttatctcgctttgaaaaaggtaatcatcagcctcccggtatttaccgggtggatatctggcgtaacgacgaattcgtagcgacgcaggatattcgttttgaggcgggcgccgtgggcaccggcgataaatccggcggcctgatgccttgttttacaccggagtggattaaacggctgggcgtgaataccgcggcgttccctgtctcagataaaggcgtcgataccacgtgtattcaccttcctgagaaaatcccgggcgcggaggtcgcgttcgatttcgcgtcgatgcgcttaaacattagcttgccgcaggcgtcattgctcaacagcgcgcgtggctatatcccgccggaagagtgggatgaagggatacccgccgcactcattaattacagttttaccggtagccgcggaacagacagcgatagctattttttgagtctgctgagtggcttgaactatggcccctggcggttgcgtaataacggagcctggaactattcgaaaggggacggctatcattcgcaacgctggaacaacattggcacctgggtacagcgcgccatcattccgctaaaaagcgaactggtcatgggggacagcaataccgggaacgatgttttcgacagcgtcggctttcgcggagcgcggctgtactcttctgacaatatgtatcccgatagcctgcagggctacgcccccacggttagaggaatcgcccggacggcggcaaagctgacgatacgacagaacgggtatgttatctaccaaagctatgtgtcgccgggcgcgtttgcgattaccgatcttaatcctacctcttccagcggcgaccttgaggtgacggtagatgaaaaagacggtagccaacaacgttacacggtgccttactctaccgttccgctattgcagcgtgagggcagggtgaagtatgacctggtggccggggattttcgcagcggcaatagtcagcagtcttcgccattctttttccagggaacggtgattgccggcctgcctgcggggctgacggcttacggcggtacgcaacttgccgatcgttaccgtgccgtggtggtcggggcggggcgaaatttgggcgactggggagccgtgtcggttgatgtcacacatgcgcgtagccaactggcagatgacagcacccatcaggggcaatcgttgcgttttctgtacgccaaatcgctgaataattacgggactaattttcaattgctgggttaccgctattccacgcgcggattttacaccctggatgatgtggcatatcgcagtatggaagggtacgactacgaatacgatagcgacggacgccgccataaagtgccggtggcgcagagctaccacaatctccgctacagcaaaaaaggccgctttcaggtcaatatttcgcaaaatctgggggattacgggtcactgtatctttccggcagtcaacaaaattactggaatacggcggataccaatacctggtatcaactgggatacgccagtggatggcaaggcataagttattcgctgtcatggtcgtggagcgagtcggtggggagctcaggcgccgaccgcattctggcattcaatatgtccgttccgtttagcgttctgaccggacggcgttatgcgcgcgacactattcttgatcgtacttatgccacgtttaacgccaaccgcaaccgcgacggcgacaatagctggcagaccggcgtgggcggcacacttctggaaggacgtaatctgagctacagcgtgacgcaagggcgtagcagtagcaatggttatagcggcagcgccagcgctagctggcaggcgacgtatggcacgctgggcgtgggatataactacgatcgcgatcagcatgactataactggcaactttccggcggcgtggtcggtcatgcggatggtattacgtttagccaaccgttgggcgataccaatgtcttgattaaagcgccgggagcgaaaggcgtgcgcatcgaaaaccagaccggcgtgaaaacggactggcggggctatgcggtaatgccctacgccacggtatatcgctataaccgcgtcgcgttagataccaacacgatggacaaccataccgatgtcgaaaataacgtcagcagcgtagtgccgacagagggcgcgctggtgcgggccgcttttgatacgcggataggcgtaagggcaatcattaccgcgaggcttggcggacgtccgttaccgtttggcgcgatagtacgagaaaccgccagcggcattaccagtatggtcggcgatgatgggcaaatttatctgagcggcttgccgctaaaaggtgaactgttcatccagtggggagaggggaaaaacgcgcgttgtatcgccccttacgccctggcggaggatagcctgaagcaggcgattacgatagccagcgcaacctgtatccgtccggcgtcataaaaggaaaaatagagatgaaaatatactcagcgctattgctggcggggaccgcgctctttttcacccatcccgcgctggcgacggtttgccgtaattcaaacgggacggcgaccgatatcttttacgacctgtcagatgttttcaccagcggcaataatcagccgggacaggtggtgacgctgccggaaaaatcagcttgggtcggcgtaaacgcgacgtgcccggcggggacaacggtgaattatacctaccgaagctatgtatcagaattaccggtacaaagtaccgaaggaaattttaaatacctcaagttgaatgactaccttctgggcgcgatgagcatcaccgatagtgtcgctggcgtattttatccgccccgtaactatattctcatgggcgtcgactataacgtgtcgcagcaaaagccgtttggcgtgcaggactcaaagctggtttttaaattaaaagtgatacggccttttattaatatggtgacgatccctcgccagacaatgtttaccgtctatgtgacgacctctaccggcgacgcgttgagcacgccggtatataccattagctacagcggcaaagtggaagtgccgcaaaactgtgaagtgaatgccggacaggtcgtggagtttgatttcggcgatatcggcgcgtcgttatttagtcaggcgggggcgggtaatcgtccgcaaggcgtcacgccgcaaacgaaaaccattgctatcaaatgtaccaacgtcgcggcgcaggcctatttatcgatgcggcttgaagccgaaaaggcctcagggcaggcgatggtgtccgataatccggatttaggctttgtggttgctaatagcaacggtacgccgcttacacccaataatttgtcgagtaaaattccgtttcatcttgatgataacgccgccgctcgcgtaggtattcgcgcctggccaatcagcgtgacggggattaaaccggcggaagggccgtttactgcgcgcggctatctacgagtcgattatgattaaggaggcataatgatccttcggcgcgttttcatcgctatcggttgtgttttgttcagcccgctgagtcaggccaactcatctctgggcgaagtgaatattgaactgcgcggtaacgtggtggattttacctgcgccgtggtggcgggcgacagtaacaagtcggttaacctcggcacctggccgacaaaacagcttcacgccgccggtgacgctacgcaaccggtagcctttagcctaaaacttgaaggttgcccgccggggtcggcgtctataacgttttccgggacgccagcgcccggcacggcattactggcgcttgctgatacggcaatggcgcaaaaactggcgattgaaattcgcgatggcgatcaacgtcgattgccacttgaacaggccagcaaggccgtcgatattgacaacaacggcaatgctaccctgaaattctatgcgaactatatcgccttagccgatggcgtgcagcccggacttgctaacgcggatgcgaccttcctgatcaattacaattagtgtccgttattgtggctcccgaacgataattcgccgggagtacatttacaataattcgtgtgatttggcgtaatcgataagctcaacgatagagtgaaggccaagtttagaaaatatattggccttatgcgcgctgatagtcttgttactcaataaaagttgctcggcaatttctttgttagacattccattggccagatagcgcagcacggtaacttcgcggttagatagtggcatatcatggtgcccgcctttgggggtacgggtattactgatgaaattaagcgtctcagatgggaaaaaagaatagccggataaaatcatttttaccgcattataaatatcattgaggtctttgcgtttacttacaaatccgtttgcgcccgctcttattgctcttccggcataaaaagcctctgatttcgacgataaaaaaagtatccgggtatgttcctggatagatttgattcgtttaagtaaggtaaagccgtcggtgcccggtaattcaatatccagaatgacaaggtcaacaggataagtgcgcagatactctatcgctgttcggctatcatccgttttcaggacaacctgaatattgctatttttaccgagtaaaacttcgatcgacattcttacaatagggtgttcgtccataatgataacagatgcaggtttcattgttgtatgcctcagactgttatgcgtccttcgttttataataagcgtcagacaccttaaagattgtgaaatagccagatctacacaccacacagtggagcaataataaagaatgagacctccctgttgactggctattttgcgtaagagtaataaatatgtggaatatccatttcgcaccaacaaaaaagaaatttctgattaagtaaaaacaatatggattatacctggtctgatttctcggaaaagtcttgcgaaatgcgaattatggatagcgggtaggatattctgtgacgttatagaaaatttgttcgtggtggagctattttctttagagttgacattgagtagtttaaactgttgtttttaagtataaaaataatatgaaagactaattgtttagtatttgttatgtaataacagaaagatgttgacgctggagacctcgaaaaacgaggaggaacaggggacgatgtaagaaaaaaatttttatcgcttaccaggacgagttgtaaatattaattttatgtgaaatatttacatttaatggaagtgaaaataagtaatttcttaaaaaatcttattcaccaaaacgttacttcgttaaaaaatgtcgtggaaagtaacgtttagctgctggatcagccgaagaaagctttgcctgtggggaaggttaaggagggtgataagttgtttaagccggtaaactacacgatgataaggtacgctttgctgacgtgctatttcttttaaagaggcgccttgcgctaaagtttcaatcatcaaccagtcagtacggctaaagctttccgataagcgaggtttggaggctgataacaaggcttcgcgtactgaggccagattttgtcgtcgcgacaggacaaaaaaacgcccagccatacggataaactgtgttatagcggaggttttatctgataccagcaggtaaatctggatatcgctttgttgccaactgagcgcgcgtagctggttaagcgcctcaatacaggagacaggtagcgcctccatatctacaatcagttgtctgagcgaccccttttcaatccacaaagaaatgtcatctaatgagcggaatgctgcggtacgttttccggaaaataagtagtgactcaatgaatagccgaggtagttgtcagttgtaattattgcctgagaaatgataccaaccggcaaggcataattgagctgttggttcagtaactcaaggcgatcaaatatctgcggcgttggagagtgataacggcaggcgcagtctttagcatttcttaaacggcggtgtctttccctgcgtggtacgctgcgcatcctgctttttccattgctctaatatatatctggtaatatggctggccataaataaccttgttccatcgttgcaccagcgtaaaaagcaatgcttcgttgctctgatgtttcaatgccttccatcagcattaactgctgaaaaaaaacttcgctatcatgttctgacggaagttgcgtcaggacctcatagccgattaattgcgcagttgagagattaacgattggctcagattttaacaattcgctgttgagatatgaatgacgtgtgggcgaagacgccaggtgtgggggatttatcctttcctttaacaaaataccctgtgccaccaaacactcctccaggcatttatgatgcagccatatattttcgacccctgaatctatcaggatattatgggcatcattgtggcagcgttaaaaaaatgcctgtaggtatcgttacttaattattggtgagatatttcgtaagccttgtaaaaagttaagtgagtttacttactgagtaagaaatgaaggttaactctaatatattttaaaaactgctgctccgttttaacatgtaattttcgcataatgctccggcggagtgactttgtctgctcttcagaaagtgaaagtaaagcggccgtttcgcttaaatgataaccgctggcgatcagttttaacaggtgacgttctgttactgaaaaatgacgagtcgtgcagtagtggcaaatgccagaagggacgctatgtcgaagcgctcgtttatgtaagatcaatatcattttccgggtaatttcttcaacatcatcttcccgataaatatgcggcagcatatacagacatggtctgaacatgagcttttctttatcgcatttattacaaataatcgcccgtagctgatgttgggtatgcataggtatctgataacagccagcgctgaaccaatcatcatccagggccaggaaagcgatatcggcattatctatctcttctggcggcagaaagtcaattttctgctgccattgattcgccagacgcgtcatgatgattttcaacccatgctcaaagtgactgttttgttccttaatagcgatacgcagcataaaaaaatatcctacacggcaggtgaatcatggtgaaatattaaagaaactgattgattttctaaatactggcggccttaattcccactttatgcgtgctgagatgtgtccaggcgatttcctggaacctggcattgcgccagaaaagacgatattcgtacacttagtcagcaaccagaacaaaagccattgactcaggagtgcctgaccgtataattctcgcgtttcgtctacacgaagtcttcacttcacaaggcgcccttagctcagttggatagagcaacggccttctaagccgtgggtcgcaggttcgaatcctgcagggcgcgccacttataaatcaacgtgttacgcttctttatttcctccttattttccatatgggacatatttgggacatcatcaccaaaaatgtcgtctattttcctcgcgtgttccgttaaatgattaggtgcaaggtgagcatatctgtgaatcaccacggataacctggacacttctgagtcgttgatgatataggttttcatattcagccggtggcatctgctcgctcgaaccatgccggcgtctactgttataaaacatttctatgtaatcaaaaatatcgcttctggcttcgtctctcgttccgtagatcttttcctttatccgttcacgcttcagtagctggaaaaagctttctgcaaccgcattgtcatgacagttgccacgacggctcattctgctctccagtccgtgcggtttcaggagcgactgccattcatagcgggtgattacgtcgccacacggccatcagaagcgcattcaggactctatcttttgtcattcatggttgcagtgaccaattgaatctattgcggcttttttttatatgtcccgctcgtcagtaacccgcttcaactctttcgggagtcggcggattccggtctgatcatctgactgctctttatttctttattggtggaggagttcgacccgtacttctttatcctggcgtaaagactgtgggtagtaatatcgagatgtgttgcggcgctggaaacagaatggccacgctcaacgacctgtcttaccgcttcaattttaaactcttcgggataacgtttaccgctcataggcacctctctttaagtcatcttaaatggctctgaggtgtctgttaaacctgtggcgattcacattgaccgcagattgtcaggttcctttacccggtagtgaaaccagtagggggcagtttatccgcactaaaagacggtgttcctgcatctgtggtggagttgaaccggatgggctttgggcacatgcgtatccttgcgtgtattggtcagttgccggagtctggattaatgcactatggctccgttgggttcttttttgggactgatggtgcattgcgacttcttgctaagaaacctgatggggcatttgtgacatacgatatgtaggaatccccgccgcccgttacccattggtggcggggaacattaattatacatgaatgttatttaattatttccgtaatattctcatttgtcctcgcccctgttctaacgtcccatgtcccagatgtaattgattctaattcatttgaatctatgccgttaatcgcccgcccggaaagccatcttccgtctatttggaatgtcttcttgtcgacatctgcatttataatttttccatcctttgttttaaagctaatgaacatcgctgtattctcatcaagagaatcagcaggatttttattaaactcaaatattacaaaggttttaatgcccatttgctgtttatatatccataatgattttatataaacgttgttacatatttttgcgttaatattaagaggcttgaaattaaaggctcgtgaatagtcgaaaaatcctggagcagttattttcaaatcaatcccgtagtatctagacattgcttcactgttaaacgtatcaagacttgggcctgcatgcagtaccggtggaaagtaataatcaggaattatcgcttgatcttgtttgttatgtttcgccctgtctattatttcttccctaatctccgtttgtttgcttattgatttaattgatgagtaatagaggatgtatgatgggatgaaatataaaaaagccattgcatatgtagtaacagataaataaatggaagccttgttaaatttcgtaaatgcagaatgagcaacaaaggaaatcgaaagaatcataaagcagagtgctccattgagagccctgctgggcattgcaggagatgcaaggaacgcaacatttgcagcaattgcacccagcatgaataaaaagcttccaaacataagtttgctgctactattccttgataacactacagagattagtagtattataaatgcaatatagacctgccaatatgcccccattgctgatggcagcctttctgaaaagtgctcaagaaccctccatgcaagtggttgattgtaccagtcttgtattgtagacgcacgggataggtttcccggagccagcaggagaacccccgcgcctattgcagatccgaatacgccaatcagtaaatatttatttctattcattataaagaaatatgctacagaaattaatacaactacaagagatgtattttcatttgagcaacctgcaaatatcgatgatatggcatatacaaagagtattaaattggattttttaccattgcttaaatatatagaaattagtatataaatggcaatgaacatgttggtccataagtaatttgctgacccaacaagccagaagttagtttgaccgagggctggatttgcaacgaagtataagaaaaataagaaaatcatcacatatggggacggtgacgactttgttaatgtagctgggatcattgtccagcacaacaccattaatgttagcgctgctgagtttattgcattgtaaatatgcggggagaaaaactttaatagagatgtgctgatcgtatctgacacaacccttccgctccatcccaaatagtgcatttttacgctagaaagcgaaagctctcttagggcataagtatagtcatcagagttcattggtgtgataaatcctattgaatacaccaacgagaaaactataaggatagcgattaccatttttaatctattgttaaccatttttcttctcattcttaattatgtacttaggccttttttttgtttctatgtaaatcctgccaatatattccccaagaatacctattcctatcaattgaacgccacccagaaaaagtacagaaacaagaagagacgggtagccaggaacattatttccaaatattaatttatcaataatcatccatgcaccgtaaaggaatgacatacctgcaataaacaatccaatgtaagtccatatgcggagcggaaatgttgagaaagaagttattccttccagcgccagattccataatttccagccattgaattttgaatcgccggcaacacgctcagcgcgggcgtattcaactacatcagtcttgccgcccacccatgacagaacgcctttcataaacagattacgttctggcatctgtttaatattttcgacaacctcacgactcattaaccgaaagtcgccaacgttctcttcaattttcggattgctgattttattatgcagcttataaaaccattcagctgtcttacgcttcatgcgcccgtcagttgagcggtctgagcgcttagccagcaccatatccgcgccagcctgccacttctcaatgagatgggggattacttctatcggatcctgtaaatcgacatcaataggaatgaccgcatccccggttgcatggtcgagacccgcgaaaagagcaggttctttaccgaagtttcgcgtaaacgaaagcggaataacgagcggatcagatgcagctattttgttaattattgattcagtcgcatctttgcttccatcgttgatgaaaacaatctcaacttcatacggttttagctcttcaaactcgcgaaccgttttatagaaaataggtatcgtggcttcttcattgaagaccggaacgactaacgagattttcatttcgcatccctaaagacaatgaactttgaataaatgaatccgcatatcaggctgatagctgaaaaggtgacaagagtaaggagtggcggcagggaacatttgtcagccatccagccaacaacggcgctcagtgttcccataaatcccacgtacatcatgtagcgaagcgtggtggtgctggcgttaaaggtgaagcgcgcattggcatagaagctgaacgatacggcgataacaaaaccggaaaagttcgccaacgcctgatgcgtatgcatcccatacacacaaaaagcaaatacgccccaatgaataagcgtgttaagaacaccgatcgatgtgtacttagcgaataacttcaacattatgaaaatcagcggattcggaaaggtctggagtgtagcactacaaattgctttgatcgatataaacgatcaataatgtggtattcaatagtttaaagttattgttatcttattaattgatcgttgttaccgatcaattggggctactgattgctaagtagtttgggacaaaaacgggacacacaaagctttgcatcggcttgcaaggctttgcatgtttttcgaagatggggcgagtgagcgccgtagtaatgggataacttgttgttagctcaggtagttccaggaacatctaagccgtgggtcgcaggttcgaatcctgcacggcgcgccatttaacctctcaaaattacgttaatccgtaagcttctgcggcggcgacgttgcgccatccgcagtacgtgacgctaatatgcaaataactaattgcgtttaatctgtttatggtgctcctcagcctggatctcgtgggagaaagaatgggcattattcatcgattaatggatgaccattgctttttcatagtcgtccatttcagaaaaggatgtcgcattttccacagtagccggggcgctgggtttctgtgtctgagccatttgctgatgcgcgaaggcgtcaccgttattcatcatctcatgtgctgtggcggataattggcgggattccattttctctgcggtgtttacgccagctgaaataaaaaaacgacagctaaaagggatgtaaacttattcatcttatttctccggtgtgggttaataagagaaataataaaacagttgttgggcctggcgcgtgacgggataatgacgattatatcagattattttgctggctagtgatagcgcctttcactatcgctacagttcaacggaggtgtttggggaatgtcaaaataaaacgagtagcgcgtgtatcggaggtgacagaaatttttccccggtgcgcagtgacgatggattttacaattgccaggcctataccgctgccttcccctttacgctggcgggagggatcaacgcgataaaaacgatcgaaaaggagcggcaaatgttccggcgcgattggcgtaccggggttttcaacaataatatgtatctggtcgtccgcttcttttatccgaagagtaatggttttacccggcggcgtatagcgcatcgtattagagagtaaattactgatcgctctgcgcagcatgatgggatcgccggtgattcagcaggcgcggccttcaaagcgcaagctcccaacaccttttcggcagaaaaactcgatgaggcgctttaccacggggcggtgctccgggtgcggccaaaagccatgacggtagcggtgattatcgccggtctgctacctgttttatgggggaccggcgcgggttctgaggtgatgagccgtattaccgcgccattgctgtcgctgttcatcattccggcagcctacaagctgatgtggctgcgcaggcatcgtcgccttgcggcataacgtgtgcaccccgcctgcggcgtcaaactgcaggcgggttcagcgtacgtttatcgtccgagcgcgctgacccgtttgcggtactcgcctggtgtacaaccgaattcacggacaaaagctttgtgaaaagaagattcgctcgcataacctaccgactcggcaatcaccatcaccggcagcacttcacgcgacagggtctgggcggcgatttgcaggcgcagcgttgttaacacggctaagggcgttgtagcggacacgtcgcgaaatagctgggcgaagctcgcccgcgacatgtgtacccgttgcgccagcgtttcgaccgtccagggatgcgccggtgtttccagcatgtgaaggatcacgcggcccagccggggatgcagtaataaattgagcacgcttttcgccgtgccagcctgcgatagccagtcgcgaacggcgagggtaaacagcgtggcgcactgctgactgtataagacatcagcgccaggtaaatggcgttctgactcctgctgtaacagcaaaatggtggcgttaatccagatactggcggggctatgcggcggcggggcaagacataacacttccggcaacgcggtaaggaaataacgtgacgtcgtgtgcagacgtagactaccgcagacgatatgtgtcggtgattcgccagactggcgcaaacggtgggcggagttttgcggcagaatcaccacctttcccggcgtaagcgtcatggcgtcgccggtaggcatttccagttgcgcttcgccctgcgtaacggtatgccagcgaatcaccgatagttcgccagcggcgtgcggcaactgccagtcgccgcctaacgggcaattcttgtcgattgagccctgaggggcgttaagcgtcaatagccgactaagcgcatccatatagactccagaacagatttattttcaaaactagagataaccatttctgtatctgttcactatatttcggactcaatgtcatttctacccttgtttttgctaaccaccaatttagacgataagacaaaaaatggcgcgttgcggataaccctgtcttttttgacgttatttatacttgtcctgacaaacagatggtgatttggcggagaaagaagatgacacagtatcaggcgctcattattggttttggcaaggcaggaaaaacgttggcggcaactctggcgaagacgggatggcgcgtggcgattatcgaacagtccgccagtatgttcggcggaacctgcatcaacattggctgtattccaacgaaaacgctggtgcatgatgcggaacgtgagggcgatttttctgtcgccatgcaacgtaaagcggcggtcgtaaattttttacgcgacaaaaattttcataatcttgccgacctggacaatgtcgatgtgattgagggaagggcggagtttattgataaccataccttacgggtatttcaggcggacggcgagcgggtgttacggggagaaaagatctttattaatactggcgcagagtcggtgatcccggctattacgggcttaacaacgacggcaggggtgttcgatagcaccgggctactcagcctgagccagcgtccggcgcggctggggattttaggcggtggttatattggccttgaatttgcctcaatgttcgccaactttggtacgaaggtcactatctttgaagcagcgccgcaattcctgcctcgtgaagatcgggatatcgcgcaggcaattacccgtattttacaggaaaagggcgtcgagctgattttaaacgccaacgtacaggccgtatcctcaaaggagggcgcggtacaagtagaaacgccggaaggcgcgcatcttgtggatgccctgctggtggcgtcggggcgaaaaccggcgacggctggcttacagttgcagaacgccggcgtggcggtgaacgaacgcggcgggattatcgtggatgattacctgcgtaccacggcggacaatatctgggcgatgggcgacgttaccggtgggttgcagtttacctatatttcactggatgattttcgtattgtacgcgacgggttattgggagatggcaaacgcagtacccgcgatcgccagaatgttccgtattccgtctttatgacgccgccgctctctcgtgtcgggctgacggaagaacaagcgcgggcaagcggcgcaacggtgcaggtggtgacattaccggtggcggcgatccctcgcgcccgtgttatgaacgatactcgtggcgtactaaaagcggtagtggacgtgaatacgcagcgtattgtaggggtgtcattgttatgcgtcgattctcatgaaatgattaatatcgttaaaaccgttatggatgcagatttaccttatacggtgttacgcgaccagatatttacccatcctacaatgagtgagtctttaaacgatctcttctctctcattaagtaaaacataaataatatagccctgttaatcagggcttttttttgcctgtcagaccataaaaatacgccaggacaaatatgctggcgtctgaaagaaaaggctttagtcaggcataacgtattataacaccattgaaataacccacgactggaaatctcgatgttaaaagttaccacacttattgcttcattattggctgcgccgctggcgttttccgcttccgcccagccgctaaccgacgttgaatatatcagcgtttctgcggtgtcagcaacgccgtcaatgcttgaagatgctattgccagactggcgcaaagtaaacaggcgtcgtcatggaaaattacgtcaatgcgtattgataatacgggttacgccactgcgatattatataaataaggagagtctgagatggataaatatcttcgtctgttaagtcagggggatcggctggggttaacattaattcgcctgagtatcgccatcgtttttatctggattggactactaaaatttgtgccctatgaggcagacagtattaccccgtttgtggcgaacagcccgtttatgtcttttttctatgaacatccggaagaatatcgtcagcatctgactcatgagggcgaactaaaaccggaggaacgcgcctggcaaaccgccaataatacgtatgcgttttcggatggtctgggcgtggtggaattgattatcgcggcgctggtactggctaaccctgtcagccgttggttagggctggcgggcggcgtgctggcattcctgacgccatttgtcacgctgtcgtttttaatcaccacgccggaggtctgggttatgccgctgggcgatgcgcattatggttttccgtatttatcgggcgccgggcggctggtattaaaagatacgttaatgctggcaggtgcggtgatgatcatggcggactccgcccgttcgttacttttacagcgacagtagcgaccctcttaccctctttatgccgcgattcgtcgggtggcgcttgcgccatccgacaatgtgttgatgaatgatggactaccctgacagaagttcctgttccacctgttgaacctgcgcctccagcgtattgcgaatttcggttagcgcccgttcctgctcggagaaataggcttccttatccgcaacggaagaggcgagccgccaggcattttccgtttccagttgcgttatctctttcaacagcgcgtcgatttgcgtgcggagctggcgtattttatggcgcagatgttccaggttattgagcctgtcgcttgccatcatcggttccagaccgctttgcaactgtgtcagtaacgcgcgaattgccgccagatcggcattctgccgcgcctgattaagctgtaccatcatctggtgcgctttttcttttaattcatcggcgaccacatccgggtgacacaggcggctggcctgacgccacaaacgttttaattcactgcgttcgtctgccgacaaacgttgatcgcgggcgtagcggaattgcgcttcctgctgctgctcccgatactggtgatagtcctgttccgcattttcctgcgcctggcggaatgcgctgtcgtcctgatgggaaaaatccgcttccagctcgcgaatttccgccagcaacgcggtgattaactccgtctgctgctggattcgctgacggatgcccaccgcttcgcgcgaggcggcattcaatcctgtccactgctgttttagcgttgccagttgatccacggcctgggaaataaattgcaggcaggattgataatccttttcccggcgttttatttcggcttcttgcttacgctgcatactcaccgcgagctgtttacgcaactccagaatacggctcatcaacggcccgagacgcagatgatagaggtcgttgaaatcgtcgaggatttgtacccgcgcatttcgtttgtcaatcagatcgcgaagttgggcttcaagcgctttcagctccagtttactggcggcaatagagggatcttgccacgtcgagagcgcccgttgagcctgtagccaggcggcgatctcttgcatggcgtcactgaatcgacgagcttcaatcgcctgggcaatcgcgctgattacggcatcctgcggctcatttttcaggtagatgagctgctgacggataatctcttcgtcctcaagttcgatggcgcttttgatgatctctaaacgtttgatgatcttattcatgacgttgatgcctggcgtggctcaaaaacggataacagataccaggtctgattcacctttttgaaaatactgaaaaaatactaaatgtattctgtagggtgtcgtacttttcgtccagagttattcacatattttatacccggcgtctgtcacccgtaacgttctatatcggcgcgcactcttttctttttactccccacgacatctttttttacacgataacgttaacgtccggagttgagccttgacaaacgattgcgccttgcggcagcgagagcgaaatgttaaaaggtgcccctcaataaaaacgatacaggggtaggacgtgaaaaacgcgtcaactgcatccggcgccagcgtgtcggatgccgcgtcgaagaatgaaccgacgcttcaacgggggttgcaaaaccgccatattcagctaatcgccctgggcggcgccattggcaccggactgtttctgggcatcggcccggcgattcaaatggcggggccggctgttttgttgggctatggcgttgccgggattatcgcttttctcattatgcgccagttgggtgaaatggtcgtggaagagccggtttccggatcgtttgcccacttcgcctggaaatattgggggccgtttgcgggctttttgtcgggctggaactattgggtcatgtttgtgctggtcgggatggcggagctgaccgcggcgggcatctatatgcagtactggctgcctgacgtaccaacatgggtatgggcggcggcgttttttattatcattaatgccgtgaatctggtgaacgttcgtctgtatggcgaaacggaattctggttcgcgctgattaaagtgctggcgattatcggcatgataggttttggtctgtggctgctgttctccggccacggcggcgaacatgccagcattgataacctctggcgttataacggtttcttcgctaccggttggcatggtttgcttctgtcgctggcggtgattatgttttcttttggcggactggagctgatcggcattactgcggcggaagcgcgcgatccacaaaaaagcattccgaaagcggtgaatcaggtggtataccgtattttgctgttctacatcggttcgctggtggtgttgctggcgctctatccgtgggtagaggtgaaatccaatagcagcccttttgtgatgatcttccataacctggacagtaatgtggtggcttcggcgctgaatttcgttattctggtcgcgtcgctttcggtgtataacagcggcgtttattcgaatagccgaatgctgttcggcctgtccgtacaaggcaatgcgccgaaatttttaacccgcgtcagccatcgcggcgtaccggtgaactcgctgatactttccggagcgattacctcgctggtggtgctgatcaactatctgttgccgcaaaaagcgtttagcctgttgatggcgctggttgtcgcgacgctattgctaaactggataatgatctgtctcgcgcatttacgttttcgcgcggcgatgcgtcgtaaagggcgcgagacgcaatttaaggcgctgttctatcccgccggaaactatttgtgcattgcgtttctggcgctgattctggtgttaatgtgtacgatggacgatatgcgattgtcggcgattttgctgccggtatggattgtattcctgtttatcgcgtttaccgttttgcgccgtaaggctcattaacttttttgcccgatcccatgttcatgcgatcgggcaatccattaatgccgcaatgtccctgacagcgcgcgaatatcgctgccggtcggcgtctgatgaatacgcaagccaaactcttccaccacggcaaaaatatggtcgaaaatatcggcctgaatgctctcatattccagccacacgacggtattggtaaaggcgtagatctctatcggcaaaccatgatcgtcaggcgccagttggcgtaccatcagcgtcatgtctttacggatgcgcggatggtggcgtaaatattcgttcagataggcgcgaaatgtcccgatattggtcatgcggcggtgatttaaggctgattccggcgcatccagttgtttattccattcatcgatttcctgatgacggctggtaaggtacggctttaacagttgcgcggttaacagccgctgtttttcatcatcatccagaaaatggatactggtcgcgtcaatattaatgctgcgtttaatccggcgtccgccggacgcagacatgccgctccagtttttgaatgagtcggaaaccagcgaccaggtgggaatggtggtgatggtattatcccagttgcgtacttttaccgtggttaagccaatatcaatgaccgcgccatctgcgccatatttcggcatttccagccagtcgcccagtttgagcatatcgttggcggaaagctggataccggcaaccaggccaagaatcgggtctttaaagaccagcattaataccgcggccatcgcgcccagcccgctgattaaaattgctggtgactggccaatcagcagtgagatcatcagaatgccgacgataattgcgccgatgagcttaataccctgaaatattccttttagcggtaactgagaggcggcgggccatttttgcgatagattgaaaatcacgtccagcaaggaaaataacgacagcagggcgtaggtcataatccataactgcgcgcaggtcgtcaggatatccgcagcctcactgcctttttgtagccagagcgcggcctgaatattgacaatgatgccttgcagcgtaaaagccagacgatggaataatttattctgggtaataatttgcagccacaggcgggaactggcgctggcacgtttttcgaaagcgcgcagtactatccagtgcaaaataatatgcacgacaactgctgtcagaaaaataataccaaatatcaccaccagcgacgtggtgtgattcatttcaattcccgctaaatcttctacccgggatatcaattcctgcataatctctcctttataaacagcagcctatgatgactgctgaatggcatttatgcaaatcaggacgcctgcgcttcaggcataatcagcaacagacgggtaaaagcgcctctggggttatccatacgctatattttatcctgcgccctgtaaacgtcgttattttacgcggttccctctttttgaacaggcgccagtccgtcaacaatgaatgaaaattttttaaccagaatgtttaaaacgattgcaatatctctgtcggataatgattagcaccgtcgtacctatcaacaataacattaaggaacatcggatgacccaaaagcgtaccctgctaaaatacggcatactctcgctggcgctggccgcgccattatctgcctgtgcgtttgactctcttacggtgattggcgatagccttagcgataccggtaataacggtcgctggacctgggatagtggtcaaaataagctctacgacgaacagttggccgaacgatatgggctggaattaagcccttccagcaatggcggctctaattatgccgccggcggcgcgacggcgaccccggaattaaacccgcaggataataccgcggatcaggtacggcagtggcttgccaaaacggggggaaaagccgaccacaacggtttgtatattcactgggtcggcggaaacgatctggcggcggccatcgcgcaaccaaccatggcacagcaaatagccggtaatagcgccactagcgcggcggcgcaggtagggctgttactggatgccggcgccgggctggtcgtggtgccaaacgtaccggatattagtgcgacgccaatgcttctggaggcggtaatcaccgctgggctgggcgcagcggcgcccccggcgctaaaagcggcgttagatgcgctggcggagggcgctacgcccgatttcgccagtcggcaacaggcgatccgcaaggcgctgctggcggcggctgcaacggtaagcagcaatccatttattcagcaactgctcgttgaacaactgctggcgggctatgaagcggcggcagggcaggcgtcagctctgaccgattattataatcagatggaagagaaggggctggagcaacacggcggcaatatagcccgtgccgatatcaacggcctctttaaggaaattcttgccaacccgcaggcgtttggtctgacaaataccgtaggtatggcctgcccgcctggcgtatccgcttcggcgtgctcctcggcaatgcctggatttaatgcgtcgcaggactatctgtttgccgatcatttacatcccggtccgcaggtccataccattattgcgcaatatattcagtcgatcattgccgcgccggtacaggcgacatacctgaaccaaagcgttcagtcgatggcgcaaggcagtcgtaccacgcttgacagccgttatcagcagcttcgccagggggaaaatcctgttggttcgctgggcatgttcggcggatacagcgggggatatcaacgttatgataataatgaggccgacgggaacggtaatcataataatctgacggttggcgtcgattatcagcttaacgagcaggttctgctgggagggctgatagccggttctctggataagcaacatcctgacgataattatcgttatgatgcccgcggttttcaggccgccgtattcagccatttacgcgccggtcaggcgtggctggatagcgatttacactttctgtccgctaaattcagtaacattcagcgcagtataacgctcggtgcgctaagacgggtggaagagggcgaaaccaacggtcggctgtggggcgcgaggttaaccagcggttatgattttgtcatggtgccgtggttaacgaccggaccgatgctgcaatatgcatgggattacagccacgttaatggttatagcgagaagctcaataccagtacatcaatgcgttttggtgaccaaaacgcccattcgcaggtgggtagcgcgggttggcgtctggatcttcgccacagcatcattcactcctgggcgcagattaattatcgccgtcagtttggcgatgatacgtatgtggcgaacggcggccttaaatcgaccgcgctgacgtttagccgcgacggaaaaacgcaggataaaaactgggttgatatcgcgattggcgcagattttccgctgtcggcaacggtgtccgctttcgccgggctgtcgcaaacggcagggttaagcgatggcaatcaaacccgttataacgttgggtttagcgcccgattttgatgacacgccagggagggccaaccccgttcgttcgtgacacgatgagccgaaagcgcaacggtaagttttataaaaagtaagtattttcaaaaatgtgggtgaagcctgtgacgtcgtttgtaaattatcgtataagcggagtttacgtttttggcggggcgcaggtatgaataaagagtccatatttcgtcagttggagctacggctagccggatgttcactaacagctgacgcgttaggcgcgtttagcgcaatggcgattgccgacagtctcaggcaaaaacgcagcattattagtcaccatcttaataacttgcatcgtgagcagcgggtggtcaaagtgaatagccgcccggtgctgttcctgcccgtcgaggcgctacgtcgtcaccaccggctggcggttcggcagggggattacgcgtccattcaggcgctgtgcgcggagcggcaggacagtctggagctgctcattggcgcacagggcagcttgcaggagtccctgcgtcagtgtaaggcggcgatcagttatcccggcgcgggcttgcctttgctgctgcgcggcccgacggggacaggaaaaagttttttggcgcgtcagctttggcagtacgccatcgagcagggcattttgcccccggaggcgccctttaccgtgtttaactgcgccgaatacgctaataacccggaattgctgacgtcaaaattatttggtcatgccaaaggtgcgtttaccggcgcagacagagcggtatccgggttaattgagaccagtaatggcggcgtattgtttatcgatgaagtgcaccgtcttccgccggaagggcaggaaaaactgttccattttatggataacggcacctggcgtcgcttaggcgaaagcagcgatgaacgcagcgccacggtacgtctgatattcgcctctaccgaagatctggaaaagcactttctggcgacatttattcgccggataccggtcattgtcaaaattctgcctatcgccgaacgcggacagtatgagcggctggcgtttattcaccatttttttcgtcgcgaggcgcagcgtcttcatcacgatttgtcgctggatagtgaaattatcagccaactgatgcaggagaccctggaagggaatgtcggcggcctggaaaatctcattcgtaatatttgcgccagcgcctggactttcggccagcgtgacgatggggtactggaagtaaaagccgggcaactgccggatcgtctgctgatggaggtgccctttaccgttccgcagacggcggaacgcatcatgatttatcgcgaaggtggcgtttttccgcgagtttccggtcagcatcaggaatatttacggttgacggaaaacatttgcggcctgtgcgaagagctggcgcaggagaatatttccgcacggacgtttgacaagctggtctatcaaaaccttacgttatatctcgatgccttaatgaataaagagagccctcgcgctcgtcaggacaagcggctgcgttttatcgaagatgtcgggaaagcgatcgctgcacattacgatctcgaactgaatgcggaattcgcttatctcactggacgttaccttaccagcctgccgttaacgccggtggaggcgtcgccatcggttcgtcatgtgatgctgcgctggctggaggaggcgccggggctggcgcagcgtgtggcgcaaaaactgctggacgtggtaaataataaatatgatttgttaatcgacacgctcgacagactggtcgtggcggccatcgtcagtaatgccattgacgccaccagcggcggtaaggtaaaagcgctgatcatcgcgcatggttattcgaccgccagcagcattgcaggcgtggcgaaccgtctgattggcgaaaagatttatcatgcgatggatatgccgatggaggtcgcgtttagcgatgtcagccgggccattgtcgattatctccagcatacggatacccgcgcaggcgtcatggtgctgatcgatatgggatacaccaaagagatcgccgatgcgcttttgagcgtaattcatggcccgctggtggtggtcgataacgttacgacgcgtctggcgctgaacgtggccagcgagatcgcgctgcaaaaaaacatcgaacagatcgccgaagagatcgtcccgttaaatcagtcgcgctgggatgtcttctggcccgcgcagaaaaaagcgcgcgcgctgctggtgacctgtattaccggcatcgggacggcgtttaaatttaaaaatttgatggaaaaaagtcagttgaccgactttgatattaatattatcgcctgtgaatatactcgcctgaaaaacagccggatggcggcctcgttgctgaatcagtatgaagtgattgcggttgtcggcaccattgacccgcagctggcgggcgttccctgggtggggattgaagagctgcttggcgagcaggggtatgcgcatttaagtcagttattaagcggttatcttaacgataaacaaattgcgttaattaataaaaatatggttcgcgaattttcgttgcataatgtggttaattcgctgaccattctcaatgccaataagacgatagggcatatcgaaacgattattgccgaatggcaaagtacgctgggcttcagctttaataataatttgattattagtttatatgttcatttgagctgtatgattgagcgactggtcatgcgcaatgaaattacccactataaaaacatgacggaatttaacgagcggcatggtgaatttatcgcgatggtaaatcattcatttcagcggttgaaaattctttataacgtggcgctgccggtagcggaaattggctatatccacgatattttcgaattacggatagaggattttcactggtagctgcggtagttcagggaaaaaggggcgctagcgccccgcagaagaaagacctgatggcgctacgcttatcaggcctacagatcgctttgtaggctggataaagcgaagccgccatccggcataactattaatattcaactttccacatataccggcgggtggtcagtgggtgattacgggctgtcgccagagcgaggttataaacgtccagcacacagttgtgcaacagaccgcagaagtattcgccaacgtcggtggacagatcctgaatgccgagtttatccgcatcgatcaactgcagttttccctgatagcgttcaataaagcgaatcgcacgatcgtccagcgggcgagtgcgaccactgctttgcagcaatataaacggcgtgcccggctcggtgatttcgaacggtccgtggaaatactctccgctatgtatgctggcggagttgatccactgcatttccagcagaatacagatagactcctgatgcgcggcgccgaaagaggggccgctgcccatcatatagaccaccttctcatccttccattcggcggcgaaacgctgagcatcttcttgtacctgccgttgggcgccgtgaacaacgtcgctaaagcgcccaaatgcgctgactaactcatcgtattgcgcatagccctctgtttgggcgagaatttccagcgccagccacaggctgtatgcggctttttgttgtgcagggtcgaccgtttccggataacgcgcccactgatattcaatgatgtagtcgctgtattcgcacaacggcgtgtcaggttggtaaaccagaccgatggtcgccgctcctttttcacgcgccacgcgggcggctgcgacggtttccgccgtattgccctgctgcgaggcgagaataacgacgctattttttcctaatgcttttggtgtggcgtggacaaattcattactggtgatataaccgacagccagttttgacgcttcacagtccagaaagtattttcctggccagaagccggttaatgaaccgccgcagccgacaaaccagacgcgttcaatgttttgtttacctaaaatatcgctaataatacggcgggcattttcatgagcaacagacatatttatctccttagcgtgtagcgcgtcctccgcaacagcgcggataataacgagcattaataaaaattaaatttcttgcttacttttcattttttgatggaattgcggatctttgggtatcgccggattaatgcctttttgcgggggtaatatcgcacatagcatttgtagcggaatgatatattcaaagacggcaaagtcctcatcattgacaaacgggaaattcagattcagaccattattttctacctgcgggccgatgcggtaaatagacggcgtccactcaccgagtatttgcgccagccgatcctgacgcgcgtcaggctgcgggtcgagcataatgagtgcggattgcgcattaaaggcattgtaaataccgtgaataaactcctcgaattcgtagcccgacaccggacagcgcaacgtctccagcatcttgagcgcaccctcctgcaccgtaccgaacagcgttgccgggccggtcagacgaatatctgcgctatcgcgcagcgccagcgcattggtttgcgcccacgcctgcgaggcggtaaccagcgcgggcaggtggttaaaggtcttttccatccgcagcagcagtgaccggcgctgttcgccgtccagccgctgttgctgcccggcgacggcgagcgccagcagcatcaaattgagaaccgtgcagtgatagccttttgttttcgcgccagcggtttcttcgccgcagggaacggtaaggatataatccgccgcccggtcgatagtcgcaggcgccacgccagccattgaggcggtgatatgaccaacattgcgggcgcgctccatcgccgccagcgttgagaggctgccgccgccctgggagatgccgacaaccagcgccttgccgctgcgggcaagcgtctcgtcgtcaagcataaacggccagcagacatccactggtaatgcgcaccagcgctgcataaacgtgcgagcggtcagcgcgccgtggtatgacgtgccggagcctgtcagaataatgcgggtgacgccgcgttccgttagcgcctgcgccgcgcgccagagatcttcccgcgtctgcgtcagcatctccagcaggcgaaggggcgtctcgttcatatagtcttctacttgcatagtgttacctctcgtcaaagcaggcccagcgcgctggcaagaagcccaaacacgacggtgcctaacaggatccagttaatgttcacgcccttacggataagtttgtacatgccgagcgtgaagagcagcggcagcagggaagggaggattttgtcaataaaatcctgcactttcatggtagtctgcccggcggtaaagctcagcggggttgtaatgtcgatcatgctggcggtcatggcgccgacgaccatcaacccgacgattgacgcgatataagtcaccctgtccatcagcccgctttgccagaggcgcatcagccaggtggtccccgcccggtagcccagtttgagggcgtaccagcggcagaggatgtgcggaatgttatagaccagtagggcgagaatcggccccagaatgctgccctgctgggcaaagtagatccccatcccggcggcgataactttcagcgatccccagaagatggaatcgccgatcccggccagcggccccatcaggctggttttaacggcattgatcgactcttcgttaaagtccgggttgcgttgattttcctcctccatcgcaatcgacaggccaaagacaaacgttgacagatgcggcgtggtattgaacagcaccagatgacgctgtaaggcgcgccccagttcggcggggtcctggtagatacgctttagcgctggcgacatagcgaaggcatagcccatatgctgctggcgttcatagttccacgatccttgcaacgtaaaggagcgccagaaaacgctgcgtaaatcgcgggcggtgatgcggctttcgctttgcgagtgagcctgtgcgtcgtcgatcagggtctgcgtcacttcactcatgattagccctcctgttgggatgtgttaagaaactggctgataatgaaagccagcaccacggcaaacagcgcgatggcgatgatgtccagtttggtatatgcggcgatcagaaagcccagcccaaggtaaggcattaatttgctgctaagcatcatgctgatcagcaacgcgaaacccagcgccggcaaaatcttactggcgacaaccaggccattggtaataaaggcgggaatggcgtcgaggaaccaggtgacggcggcagaaccgagcaaaatggcgaaaaagaccggcagaaaaccgcttagaaaatagagcagcgttgggcctcccaggtgcataacggcaaccatccgggtattaccctgcgccgcataacgatcggccatgtggccaaagcgggcgttaaccacgcgcaccaggacgccgagggtctgcgccagcatagagataggaatcgcgatggtcagcgccgcttcgggcccgcgcccggacataatagaaaacgcggtcgccagcaccgaaccggtgacgacatcaggcggtaccgcggcgccgatagcgacattacctaaaaagatcagttccagcgtcgcgccgatcagaatgccttcgtgtaaattgccgcagaccagaccggtgagggcgcacatcaccagcggacggtcaatcatcgacacgccgagtaaacgcccgtcaagaatgcccagtgcggcaatcaggccgagcagcgttgcggtgagcaacatagtgacctccgggttcagagtttatcgttaagcaattcggcggaatgagccggaacctggcgcatttccagacggatgcctttggcttttagcgcctggctatcggcaatctcctgctcggtcaggtatatggctttgccgaactgctgcgcgccctctttttgcgcgataccgccgtagttgataacgctaatccctggcactttctcgacgaaggcgagggtttcggcggtatttcccagcaccaccatcacttttttgtgatccagcttgccgctggcgagtttttccgccgcctgttccaccgtgataatgtccagcgacacgccagcgggttttgccagacttaatgacatagagacaaacgcgtcgccggcggcgttggcgttagcgacgatgatatggtcgatatccagcgcccgggtccaggcgaagaccacctggccgtgcagcaggcggtaatcaatgcgcactaatttgatcatgggattctccctgtaggtcagcggatggttgtgttattagcgtgttgataaagacaatggattcacgcgccgcattggtggcgtaggtaatggccgcgtctgtgctttcttcttcacagagtaaaaactccagcaacagggtcatgttgacgccagccaccacaaaaacgtgacggtgacgcatcagcactttcgcggcgctattgttgatgctgccgccgagcagatcggtaaacaccaccacttcttcgccgttggcttgcgcgatcagattttcgagggtttgttcaagctgctccgtggtgacaatatcgccatcgtaggcgcaaaccggtgtcacgccgtgttcgtcgccaatcagcagcgatagactgttaataagtccgcgggcaaaagggccatggctggctacataaacatgtctcacccgttttctccttcatccagatagggggtatccagatatggcaaacggcgtgccagttttaaatgttatttattttcaataaattgaaagaggaagttaacactagcgatgtaaaacctggcacttcgcgccattgatcattgaggaacctggcagaaaggtgaaaaaagccggacgggcgtccggcttaggcaggggattaaacttccgtcagtgtggtttcaagcggcagacgtgatttcggcagcccggcgttgaaatcctcgacgctatgatggccgaccggcaccacgaccagactggtatagcctttttctttcagaccaaattcagcgtcgagcacctcggcgtcgaaaccttcaatggggacggcgtcgagacccatcgcggcgacgcccagcagaaagttgccgacgttcagataaacctgcttcgccatccactggtggtcatctttcagcgagacgcggtgcatatcggcgaaaaagcggcgacctttatcatttgccgctttagcttccggcgtagcgaaacggccatcagcatcttcctgatcgacgacgcgctcaagccatgcgtcatccattgcggttttggcgcagaagaccaccacatgggaggcgtccagcattttgcgttcgttgaacgtgtagtttccggcagcggattttgctacgcgcgctttgccttcttccgtactggcgacaataaagtgccacggctgggaattggtgctggaggggctgtactgtagtagtgtttttattttatccgcttcttcggcggtcagttttttgctgggatcgaacgccttagtggagtagcgctgtaaggcgacagaaacgatatccataaatgctcctggttggtttagtacccttttgtatcagcagggtaccgggttatcggtaaaaagataagggaggaaaatgcggaaacggttattgcatcagcgcggccgcaggcgcagttgctctcttttaggcagcccgtctacgaccagattccatgagtcatttatcaaatcgttgagtagcgagacggtgatatcctcgcccgcatagactgaaatccagtgtttcttattcatgtgatagccaggcgcaatgctggggtaaatttgttgatttaccagggacttttggggatccgacttcaggttcaccactgggcgacagtgatgttcagtgaacagcatgaatattttgccgccgactttaaacacatcgtactgtgggccgaaaggccagcagtgttcggtaaaaggcagttccagcgcaaagcgttttgcccaggcgtgcagtgtttgaccgtccattattgctcctcgcgagtcagcgcgcgccacatggcttcgaatcccagcgcaatatattcgccagcgcgagcgggatcgcgcgcggcgaaatccattgttgtttcagccagcgccagaaaaaggccgtcgccgaaggcgcggtattcatccgacataaacaccatcaaaacggaacgatgacataaatcgcgcaattcggggaacatatcgtcggcccgttgttccgtctctttggtgagcttttcgctgacggccagttgacggatcgcccgatggcgcgcgggatggttcagaccccaactgatgtaactgttccagataaaacgagtcatcattttggcatcggtaatggatcgatccagctccattatcattgactggcagagatcctgctttaaatgcaaatacaacgtgttaatcagctcatctttggtcgcgaaatagcgaaacaatgttccttctgcaacacctgcgttacgcgcaatcaccgccgttgaggcggcgataccggattgcgctatcgcctgggttgccgcttccagtaatgcttgttttttgtcttcactcttcggacgagccactacacgttacccttatgtctggaaaaacatgattgaatcatgcccgttgtcgcgtcgcaacggtgaatgtcaacctttgaaaagtaccttgacggcgtatctttgctttctataatgagtgcttactcactcataatcaagggctgccgcatgaagtggtagaaaagcatattgcaggccatgcgataagctgtctcacaatttgtgtggttattactatgcttattgctgttgccgtaaatgtgcggtgcgggagccgctgacgagtttgatagaggggagagcacgatgaccatttccgctcaggttatcgacacgattgtcgagtggattgatgataatttgaatcagccgttacgtattgatgatattgcccgtcatgcggggtattccaagtggcacctgcagcgcctttttatgcagtacaaaggggagagtctgggacgctacgtgcgtgaacggaagctaaaactggcggcgcgcgacctgctcgacaccgaccagaaggtgtatgatatttgtctcaagtatggttttgattcgcagcaaacctttacgcgcatttttacccgcacgttcaacctgccgccaggcgcttatcgtaaagaaaagcatggccgtacgcattgaaatgtttaatcggccagcgaaaaccagcgccgccagataaagcgaatgacataatattccagcgcgccgagcaacagaaaccataaacaaaacaacaaagtataaagctggttgagatccataagatgaaagatcccgaccagtttttgcgccagcgcaaggccgagcgaaggggcgggcagcagcaggctggagagcaacgccatcagcaaaataccggcagcggtcatcaatgattcaagcgggtgtttcatggctttgttaaacgtaagttaaaacgccattgtccgggatatcgcctggtaaggcaaatatgctgtctattgtcccgcccagatttcacaatgtttttgtaccagacctatcagcgatccgccgtcggcaataaactcccgcatatattgcgcttcgttaccgccttttttcacctgcagacgtagcgcgtcaatggcgctgtcggcgcccagcttgcgcgcagagggggtaacgttgtccagcagacgcagcgtatcatctgccaggcgacggcggtcgccggtataggcatcggttagcacgccctccagaccatagcggcaagcctgaaaacggttgaatttatataacagatagtcttgttcctgcggtttaaagggacgctcggtcagcagccagtgcgcggtcgcctgaatcaaccctgccatattgatggcatgatcaagagtgagcggcgtatccatcacccgaacttctaccgtgccaaaggccgggctggggcggatatcccagtgcaaatctttgatgctgtcgatcatcgtggtgtaagacagacgacgaaatagtccggcaaactcttgccagttactgacccacggcatgggcccgttatcgggaaaagcggaaaaaatattcaggcgcgcgcaggcaaaacgggtgtcagctccttgcatatagggggacgcggcggagagcgcaataaagtgcggcacaaaatgcgacagcccgtgtaaaagataaatcgcatcgtcgccgttcgcgcagccgacgtggacatgctggccgaaaaccgtcgcctgttgaattaagtagccgaaattttccagcgtgcgttgatagcgctcattatcacagacctcctgacgctgccatttttgaaaagggtgcgtaccgccgccgcaaatgccgagatggtgttccgacgccgcctgtaaaataacgtgctgcatagcagaaagttgggccgccgcctggtcaatatcgcggcagacgcccgtggccatctccagcatactttcggtgatatcgtgcttaatttctcccgcagtaagttggggcttaacggcgtcgatcagcgtagaagagtcctgacttaaatcgtagccaggtggattgatcacctgcatctccagctcaataccaagcgtataaggttcagaaacgtgaaaatcattcagcgccatagggatctcatttatcggggtattgcgctaagtatagaagcgggagcgctcctgtcgtggggaacgcgcgttattgcagaaacaagagtaataacgctattgtcacgttgaaaccattctgtacggacggtacgttcagccatcgtggcggcaaaggctggcagcagatgtaacgagatgtgcgtggcggtaagcgaggtaacttttgcgctattgaatcccgggagcgtgacgcggtctgaaaaggctttataaacgctctctttggcggagaaagccagcgtcagggcaagcggaaaagggagcaagctcgcctggagaatttggcgctcatcgctatcaataatggacggcgccagctctgtcgccgtgtgctgactcatgattttttctatatcaatgccgatacgctgtcgggatatgacggccagcgccgttgtcgcacagtggctgatgctgccaaataggccgtccggccatagcggctgtcgcttgtcgcccataccgggcactgtcctgacgcccacctcgcgtagcgcatgaacggcggcaatgcggcctgccagatgttcagctttacgcttgcgtccggcagaccggagccgatcgtgatgaggtagccatagcaggtcgtgttcgcgaaagctgctcgcatcaaagtcgacgatatgcagcctgtgtccggcaaagggaaggggaaaatgagatgtcagcatcgtttttgccaattccctccccgaatgagggagggaaggttgccatcagaaatgggtattaatgctcatataccacgtacgtcctggttcgttataggtgtacgcgccagcgcccgccatataagcgccagtttgcgtatccctgacggtttgcgcgttaccttcacgccacagacgtttgtcaaagaggttatccacgccaccggtcaggctgacatttttggtcacgtcccaggtcgcgctcaggccaacaatactgtatgggctgaccgcttgcttatctgttccggtaacggggttaccctgataatcatatttcttcggctcttgtttgccgtaccaggtgaaggtcgattgcagagaaacgtcctgacgtacctgccagctcagggttgagttaagcgtgtactgtggaataatcgacaggcgttcgccggtctctttgtttttactctgcagcatatacgtaacgttattcgtccagttgacggtgtcgctaaccggtacgtttaacgtgccttccagaccttcaacgaccgctttcggcacgttctcccactgataaacatccgttttgccgttgttgatacgctgcaacggcactgtacccgcttcaatcttattgcggtaatcattgcggaaccaggtgacgccggccagccagccatcgcgtttaaattccagaccgatctctttattgatgctagtttcggctttcagatcatcgttacccatcatatagcagccgatgccggtacccgcgccagtcgcgtagcaaccctgacctttactgtacaaaatatagtttgggttagtctggtacagactcggggctttataagcgcgggcgattcccattttcagggtaaagtcatcccccagaccttgcgacaggttgagggacgggctccagttatcccccacaatactgtgatgatcgaaacgtagccccggcgtcagcatggtgctgtcggtcagttccatgttgttttcagcaaacagagagaaaatttccgcttttgaataggggctacgattggtactgctgtaacccgggatatttccccccataaaggtttgcgagttggagagctggtctttcatacgctgttgggcccattcagtacccagcgtcaggttttgattgaccagcagatcgaaaggaaggctcacttcgctgtgtagggtgacgtcattcaaatcggcatcggcatatttttgcgatgctttgggatcgaaaattccttcggtgccgcctgccaggccttccggcatccgggagttacgggtatgttcgtattgcacccagttactggtggttacgccattattccagccgccgttccaggtcagagagtagttctgccgatagaggcggttcgtctcttttccgtaattatctttcaccagttggttcgtattggtgttctgagtatcgccggcatagagattgccctggcgactgtatccggcctccagctccagagactgaagcggagcaaaatcccaacgaaccacgccgttgatatctttgttaatgaccccctcgcgtcctgctggtagcgtgtcggcgtaactcccggtacgttcagactgatgcccctggttaatattacgcgcatccgcctgcgttttgtcgaggttgccatacaggcggaagctgaaatccccgcccagcgggccgttcaggctaaagttagtgcgtttggtcgcgccttcgtctttatgttccggcgcgttgaaataggtattccaggaaccgtgccactcgctaccgccttttttggtaatgatattgactacgccacccgccgcgccgttaccgtagcgtgcggcggcagggccacgcagcacttcaatgcgttcgatcatctccggcggcacccacgcggtatcgccgcgggtatcgcgttcgccgcgccagcccaggcgcaccgagttacggctggtgacgggtttaccgtctatcaggatgagggtgttttccggccccatgccgcgaatatcgatttggcggttattcccgcgctgaccgctggtggagttgccggtcaggtttacgcccggcatggtgcggatgatttctgacacgtcgcgcgcgggcggatttttgcggatctcatcggcggtgatggtggatacgcctggcgcctgtaggttttgctgggcagcggtcaccacgatggtgtcttcattggtgagcgcagcgctatcggttttgtcttccgccatcacgggcagagtggccccgtaaatccctaaattgaccagtaaggtcagggaatgaatcttcttgttcattgtatatcctgcttttctttagccacataagccaaagcgcccgtcaaaggcattggccgggtggtgaaattgtgttcgcgcgtcccatagcgcgacaatacgctattgcaaatgcaaatagttatcaataatattatcaatatatttcaccttttatatacaaaattcataataaacacagggttataatgaaagaggcgctggcaacgggaagtgaggcctggtggaggacgaaaaccgggccggaatggatacgggaaaaagacggaaattatcgggtcactttttggtggcgcgacccgcagggaaacgaaacacactccccgatacggcgtgtctgggtctacatcactggcgtaaccgatcatcatcaaaacgcgcagcctcagacgatggcgcgtattgccggaacggatgtctggcgctggagcacggcgcttagcgctaactggcgcggcagctactgttttattcctaccgagcgcgatgacgtttttgccgcttttgcgccgggcgaaacgcccgatcggaacgtgctgcgtgaaggctggcgacagctattaccgcaggcgattgccgacccgcttaattcgcaaagctggcggggaggacgtggtcatgcggtttcagcgctggaaatgccggatgcgccccttcagccgggatgggatcgtcctgaaacgccgtactcgccgcctttgatgatgcagtggcatagcgaacgtctgggtaactcccgccgcgtatggatattgacgaccggagacgaggcgccggaggaaagaccgttggctattctgctggacggtcaattctgggcggaaaatatgcccgtctggcccgcgctcgcctcgctgactcatcaacgcctgcttcccggtgccgtctatctgctgattgacgcgattgatactcaacaccgcagccaggagttgccctgcaatgccgacttctggctggcggtgcagcaggaactgttgccgcaagtcagagccgtgacgccttttagcgatgatgccggacgaacggtggtcgccggacagagctttggcggcctgtcggcgctgtatgccggcctgaactggccgacgcgttttggctgtgtactgagccagtcaggatcgttctggtggccccatcgcatcaccccgccggagggggaagtcattacccggctgaaaaccggcgcattatgcgcgcgcggactgcgtatcgtactggaagccggcgtgcgtgagccgatcgtgtttcaggcgaatcaggcgctttatgcccaactgaatacttcgcagcagtccattttctggcgtcaggttgacggcggacacgatgcgctttgctggcgcggcgggctaacgcaagggctgatgctgctttggcagccgcttatcgacacgctttaaccgggcacatgtccatgacaggagttgagtatggaattcagtaatcccttcgataatccgcagggacagttttacatcctgcaaaatgcgcagcgtcaattcagcctttggccagcggcatgtgcgcttcccgcaggctgggacgtggtatgcgaaccgcaatcgcaggacgcgtgccagcagtggcttaatacgcgctggacaacactgaatccggcgcattatgccgataagcaggaggcgaaatgacgcagcgtttaccgttagtcgccgcccagccggggatctggatggcggaaaaactctctgatttaccctccgcctggagcgtggcgcactatgtggaactgaacggcgagctggatgccgccttgctggcaaaagcggtagcggtagggatgcaacaggcggatacgctacggatgcgttttaccgaagagaacggcgaggtctggcaatggatagatcctgagcacaccttcggcgagcccccgattgccgatttacgcgaccagcccgatccgcatcacgcggcgctggcgttaatgcaggcggatttacggcaaaacctgcgcgcagatagcggtaagccgctggcgtttcaccagttaatccgcattgatgatacccgctggtattggtatcagcgctatcaccatttgctggtggatggctttagcttcccggcgataactcgccagattgcggcgatttatcgcgcctggcagagcgacgctcctacgccggagtcgccttttaccccctttgcggatgtggtcgaggaatatcagcgctatcgccagagcgaggcctggcagcgtgacggcgccttctgggcgcagcagcgccgcgagctgccgccgccggcgtcaatgtctgccgcgccgttgccggggcggtcggcgagcgcggatattctgcgtatgaaattgagcgcgccggcgggggcgtttcgccaactggcggcgcacatgcctgagataccgcgagcggatcttgccctggcgctggtgacgttgtggctggggcgattatgcgggcgaatggattatgccgccggatttatctttatgcggcggatgggctcggcggcgttaacggcgaccgggcctgtccttaacgtgttgccgctggcggttaaccttcatgcaacggaagatctgccaacgctggcgaagcgtcttgcggcgcagttaaagaagatgcgccgccaccagcgttacgacgccgaacagattgtacgcgatagcgggcgagccgcaggggagacgccgctatttggcccggtgctcaacataaaagtgtttgattatcatctggatcttcctggcatacaggcgcaaacccataccctggcgacggggccggttaacgatcttgaactggcgctttttccggatgaaaacggcggtctggatattgaattgctggcgaatgcacagcgttacgatgatgccacgctctcccgccatgccttacgattgatggcgcttatcacgcagtttgcggataacccggcgctgcgctgcggcgatgcgcaaatgctgctggcggaagaacaaacgcaattagcacaccttaataatacggcggtaacgattcccgccgccacgcttagcgatttggtggcgcagcaggcgcaaaaaacgccagaggcttccgcgttggcagatgcgcattatcactttacctaccgtgaaatgcgcgaacaggttgtggcgctggcgtacgcgctgcgggaacgcggcgttcagcctggcgatagcgtggcggtggcgttgccgcggtcggttttcctgaccttagcgctgcatggcattgtcgaggcgggcgccgcctggctgccgctggataccggttatcctgacgatcggctgcgaatgatgctggaagatgcgcagccgaaactgttaattacgactcaggcgcagctggcgcgctttcacgatattccggggatggaatatttgtgttatagccaaccgctaccggtcagtgacgccactccgctgaggctgtcgttaccgcatcataccgcttacatcattttcacctctggctcgacgggcaggccgaaaggggtgatggtgggacaaacggcgatagtcaaccggctgctgtggatgcaggatcactatccgttgacggcggatgatgtagtagcgcaaaaaacgccgtgcagttttgacgtctcagtatgggagtttttctggccgtttatcgccggggcgaaactggtgatggctgaaccggaagcgcaccgcgacccgctcgcgatgcagcggttctttgcgcaatacggcgtcacgaccactcattttgtgccgtcgatgctggcggcctttattgcctcgctcacgccagcgtcggctgggaaaagctgcgcttccttaaagcgcgttttctgtagcggcgaggccctgccgacggcgctgtgccgcgaatgggagacgttaaccaacgcgccgctacacaatctgtacgggccaacggaggccgcggtggatgtgagctggtatccggcctgtggcgatgagctggcggctgttgacggcaacagcatcccgattggttatcccgtctggaataccggtttacgtattctcgatgcgcatatgcagccggtgccgccgggcgtggctggcgatctctatcttaccggtatccaactggcgcagggctatctggggcgtccggatcttaccgccagccgttttatcgccgatccttttgcgccaggcgaacggatgtaccgtaccggagatgtggcgcgctggctggattccggcgcggtggaatacctggggcgcagcgacgatcagctcaaaattcggggtcaacgtattgaactgggcgagattgaccgcgtcatgcaaacgctgccggatgttgaacaggcggtagcacatgcctgcgtctttaatcaggcggcggcgacgggtggggatgcccggcaactggtcggctatctggtgtcgcactccggtttgccgctggatttaccggcgctgcaggaaaaattacgccaaaaacttcccgcgcatatggtgccggttgtgctgttgcaacttgccagcttgccgcttagcgctaatggcaagctggatcgcaaagccctgccgctgccggacctggcgccgcgcgtgaaagggcgcgcgccgcagtccgcaacggagattgctgtcgccgcggcgttttcccgcctgctgggctgtgagattaacgacgttgaaagtgatttctttgcgctgggcggacactcgctgctggcgatgaaactggccgcgcagctaagccagacgtttaaccgccaggtgacgccggggcaggtgatggtggcgtctgacgtggcgcagttgagtaagctgctcgatactgacgatgacgaacgctcgcgcaatctggggttcgggccgctgttgccgctgcgtgaaagcgatggtccaacgttattttgtttccatccggcgtcggggttcgcctggcaatttagcgtattatcacgctatctcagcccgtcgtggtcgattatggggattcagtcgccgcgccccgctggccctatgcaaaccgcaaccacccttgatgaggtatgtgaacatcatctggcgactttgctcgcccggcagccgcatggcccttattatttattaggctattcgctgggcgggacgctggcgcaagggatcgccgcccggttgcgcgcgcgcggcgaaaccgtggcgtttttggggttactggacacctggccgccggaaacgcaaaactggcgggaaaaagaggcgaatggcctcaatccggacgtattggcggaaattgaacgtgaacgcgctgcgtttgtcgccgcgcagcagggaaatgcctccgacgccttatttaccgccattgaaggcaattatgcggatgccgtccgtttgctgacgacggcgcatagcgtaccgtttgatggacatgctacgctctttgtggcggataaaacggtgccggaaggcgtatcgcctgaacagagctggtcgccgtggatagcgtctttggctatttatcgccagccgtgcgcgcatgtagatattatttctccctccgcttttgaaactatcgggcccatcatcagcgaacttattaataaataacgggcgttgtttctgcctttaacaaattaaatcctgaaacccataataattactaattattatgggttttttattgcaactattaattcttttaacataagtgatacatgctacaggcaagtttaattccgaatatttagcttttcgggcactggcgcgtaaagattgtttcggataattctgacttgctgttagaatctctgacaggaatgtgttctttcattggataaagttttcaggtcatacggcatgccatctcttaatgtaaaacaagaaaaaaatcagtcatttgcaggttattcactgccgcccgccaacagtcatgaaatcgatttgtttagccttatagaggtgttatggcaggcgaaacgtcgtattcttgctaccgttttcgcctttgcgtgcgtggggttgcttctgtcctttctgctgccgcaaaaatggaccagccaggcgattgtcacaccggcggagtcggtacagtggcaggggctggagagaacgttgaccgcgctgcgcgtgttggatatggaggtaagcgttgatcggggcagcgtatttaatctgtttattaaaaagtttagctcgccctcgctgctggaagaatatcttcgttcttctccgtatgtcatggatcaattaaaaggcgcgcaaatagacgagcaggatcttcaccgggcgattgtcctgctgagcgaaaaaatgaaagcggtggacagtaatgtcggcaagaaaaatgaaacgtcgttattcacgtcgtggacattgagttttaccgcgccgacgcgggaagaagcgcaaaaagtgctggctggctatattcagtacatctccgatatcgtcgtgaaagagacgctggaaaatattcgtaaccagctggaaatcaaaacccgctatgagcaggaaaagctggcgatggatcgggtgcgtctcaaaaatcagcttgatgccaatattcaacgtcttcattattcgctggaaatcgccaacgccgccggtattaagagaccggtttacagcaatggtcaggcggtaaaagatgatccggatttttctatttctctcggcgcggatggtatttcccgcaaactggaaattgaaaaaggggtaacggacgtggccgagatcgacggtgatttgcgtaaccgtcaataccatgttgaacaactggcggcaatgaatgtgagtgacgtgaagtttaccccgtttaaatatcaactgtcgccgtctctgccagtgaaaaaagatggcccgggtaaagccatcattattatcctggcggcgttgattggcggtatgatggcctgcggcggcgtattactgcgtcacgcgatggtctcgcgtaaaatggaaaacgcgctggcgatagatgaacggttagtctgatttacccgaaaagccggatagcgatatccggctttgtcatcagtgtgggcgactatcgccgccccagcggtaccaccagcggcgtcccggcaaccggatcgtcgataatcatacagcgcagcccatagattttttcgataagctctgcggtaacaatctctttcggcgcgccctgtgcgacaatattaccttcgcgtaatgcaatcaaatgcgtggcgtatcggcaggcctgattcaggtcatgcaggacggcggcgagcgtatagcctttttcgcggttgagatcgcttaacaactccagcaaatcaatttgatggctaatatccagccacgttgtcggctcatccagcagcatgatggacgtttcctgcgccagcaccatggctatccacgcccgctgacgttggccgccggacagagtgtctacactttgcgccgccagtgaggtgatacctgttgcacgcatggcactggcgacggcatcggcatcttccttacgccagcgggtaaataacggctgatgcggataccgccctctggcgaccagctcttgtacggtgatatcgcccggcgtggtagcgttttgcgccagcaatccgatgcgccgcgccacctctttactggcgtaacgctgtatttgttcgccatccagccagacatggccgtcaacaggcgtcatcagacggcttagcgtacgtagcaacgtcgacttgccgcagccgttagggccgatgatggcggtaaaatggccgtccggaatcgaaacattaaggttttttgcgacggtatagctgccataacccagcgttaactggtcgccgcgcaaacgggctacggattcggtcattttttgcgggactcctgaattaacaagacgataaggtaaataccgccgaggctgacggtgaccacgcccactggaagctgataaggcataaacagttgctgcgcgcacgcatcggcggccagtagtaataacgcgccgcacagcgccgactgggttaatccccagcgcgctgtgccgctaagacggcgggcgatgtgcggcgcgacaagggcaataaacgagatggggccagccagtgccgttgccgcagcggtgagcgacaccgccaccagcatcagcatcaggcgtgaccgctccacgctaacacccagcgcgcaggcgctgtcatcgcccatctccagcagccgcatacgacgcaccagtagcgcggcgcctgtcagcatcaccataatcagcggcgccgaaggccaggtttttgcccatgtcagaccgttgagcgacccggcgttccataagccagcggtgagcgccgtttccagcgacgcctgcaacagaagccaggtattaaaggcgactaacatcgcgcggatgccgataccgatgataatcagccggaaagtttcaatcccgttacgccaggcgagcagccagacaatcaatgacgtgacgataccgcccgccattgccgccagcgcgatcgcggtaagatgctggccaaacaggaccattgcgaccagtacgccgctccaggcgccggtattaaagcccatcacatcagggctgcctagcgggttacgcatcaacgactgaaaaatcgcgccactgacgccaagcgcagcgccaatcagtagcgccattaatacgcgcggtagtcgccattcggttacgacaagggtgatgttacgcggcgcgtcgcccagcagcgcggcaataatctgcccggtctcaaggggcacggcaccgctttgcaggctccataagccaatggcgaagcagccagccgccagaagcaggcagcttacgataagccgacgagaaagaaacatcacaggccgcctccgctcgatttacggcgtaccagaaagataagtaccggcgcgccgataaacgcactgacgaccgatacgcggagttcgcccggcactaacagacgaccaataatatcggcaaaaagcagcagagcaggggttgccagtagtgttaccggcagcgaccaacggtggtctgcgcccaccagccaacgcgccatatgcggcatcatcagaccaataaaggcgatagggccgaccagcgccgttgcgctgccgcacaagacggtaatcgccagtaaaccgataagttgggtgcgcgccactttactccccagcgccgtcgcagtatcgctgccgaggctcaggctattcagcgcacggctcagaaatagcgccacgatcccagcgataaccacgggcgcaagcgcgactttcaacgtttgcaggctacgaatgtccagcgatcccgcctgccagaagcgaagctgatcataaacctctggatttaacagcgcgatgccgctggtcaatccttccagtaccgcgccaagcgccacgcccgccagtgtcaggcggaccgggcttaactggccgccgccctgactaccggtgaaggcgacaatcagtgatgcgataagcgcgccgctaaatgccatgaaaagctgttccagcggcgtggagaaaccaaacagcgccgcgcccagtacaatggcgaagctggcgccgttgttaacgcccagaatccccgggtcggcgagcgggttgcgagtgagtgtttgcatgagcgccccggcgaggcccaacgcgccgcctgccagtaatccggccagcgtacgcggcaaacgcgcatccaggacgatggtgcaatcggcgctttggcacacgccggtgaacgcctccagcacgacggcggcgggcagcggtttcgcgccaatgaccaggcttaaaaccgcggcgagactcagtaataacaacaatccgggcacggcaaacgcgcgcgtcacggaaaacgagcatgacatagtaacttccctgataatgatagtaattatcgttatctatcttatttggttatgttagcatgtgcagccattgaatggatatttaaaaaaactcgcattaaggcgttgtaatgaatcgacaatcctggctgctcaatctcagcctgttgaagacgcaccctgcatttcgcgcagtatttctggcccgttttatctctattgtctcgctggggctgcttggcgtggcggttccggtacagatccaaatgatgacgcactccacctggcaggtagggctgtcggtaacgttaaccggcggcgccatgtttattggcttaatggtgggcggtgtgctggccgatcgctacgaacgtaaaaaggtgattctgctggcgcgcggtacttgcggtattggctttattggcctgtgcgtgaacgcgctgctgccggaaccgtcattgctggcgatatatctccttggcctgtgggacggctttttcgcgtctctgggcgtgaccgcgttactggcggcgacgccagcgctggtcggaagagaaaatctgatgcaggccggcgcgattaccatgctgacggtacgtctgggatcggttatttccccgatgttggggggcatattgcttgccagcggcggcgtagcctggaactatgggctggcggccgccgggacgtttattacgctattgccgttactgacgctgccgcgactgcctgttcctccgcagccgcgggaaaatccatttatcgcgttactggcggcatttcgttttttgctcgccagtccgcttatcggcggtattgcgctgcttggcggcctggtgacgatggcaagcgcggtacgcgtcctctatccggcgctggcgatgagctggcaaatgtcggcggcgcaaattggtttgctgtatgcggcaattccgctgggggcggccattggcgcgctgaccagcggacaactggcgcatagcgttcgtccggggctcattatgctggtttcgacagtcggttcttttctggcggtggggctgttcgccatcatgccggtctggatcgctggtgttatctgtctggcgctatttggctggcttagcgccatcagttcgttattacaatacactctgctgcaaacccagacgccggaaaatatgctggggcgaatgaacggcctgtggaccgcgcaaaacgtcacgggagacgctatcggcgcggcgctgttaggcggtcttggcgcaatgatgacgccggtcgcttccgcgagcgtgagtggattcgggctggtgattatcggtttgttgctgctgttagtgctgggcgagctacgtcgttttcgccagacgccgccggttagcgatgctggctgatgaaggggcgtttatccgactgaccaaatcggtctggtcagtcggataagactccgataaggctaaaacagggcggcaagccggttaagcaacaatgttgcgctgtaataatccagacggaacgtctccgtacccagggcatagacgcgcttattttgcaccgctggcaggtgcgccagcagcggattggcgtaaagggccgcgacatctttgttgtcgccggcaaacaggaaaagagattcgccgtttaacccggcggccagattttcaccgccaagctgaatgatatcgtggcgcttaccctggcttttgctggtttgcagccctcggggcaatgtcgccagcgtaaagcctaactgtgtcaatagcttgccttgtgctgattctggcgtccacagattggcgctatgcgcggcaggggtatacaccagcgcgctaaccggctgcggcggcagggcgattcgctgtttaaccgtcgtcagttgcgtctcaaactccgctattcgcgcggcggcctgtttctcctgaccggtgatctcgccaagttgcgtgagcaaactctgccagcttttatcgtcataattgatgacgagcgtcggcgcgatagcggagagctgatcgtaaagcgccagcgcggagtcgccgccggtggcgctaatcaaaatgagatccggcatttgcgcggcgaccgtttcggcattcggttcgccgatgtacagccgggcgacatggcgagcctttgctacgtcgctccactggcgcataaacccttgatcgtcggcaaagcggttattcggcgtagtggctccgctggcgacgacgggcgcatcaatcgccagcagcgagcctgtcaacgtcacgctggtagagacgatacgcgcgggtttgtggtccagagtatgaacgccgcggctgtcctggatttgccggggccaaccggcgtcctgggctaaggatattcctgaaattgatataccaaccactaaaagcagccaacgataaaaggcggggagtctcacaatagcgtcctgttattaataaagttaatgcttctcattttcatgtcagcggcagcgagatgcaagccttagtgccatttaactcatgaccagagttgacagagcgacgttttactcttaggttagcgcactaaaaatagaaataataatcattattatacacaaaatcattcaagaagcatcgcaacggcaagggaagaaatccccgcgggcatagataactgtgtgaccggggtttctgatcgcagccaacaaagaggcagcttgaaagatgaagtgtatataagcctttatcattggaggatgatatggatatgtcactggccgaggacgctcaggagacaatggcaacgcttgctcccgatcgctttttcttcatgtcgccgtatcgcagttttaccacttccgggtgcttcgcccgttataccgagcctgcggttgccggagattcgccggatagccctttccagcagaaattgcgccagcagtttgccgaggccaaatcgcagggcatcgccaaccctatcctggtgggggcgatcccctttgatactcgtcagccgtcgtcgctatttatcccgatggcgtggcagtccttttcccgccagcaaaagcagcgcacggcgcgttattttactgaccatcagtcgctgacggtgacggcgcgaaaggcgattccggagcaggatgcttttgaagcgatggtcgcacgcgcggctatgctgaccgccacgccagacgtcgataaagtggtgctttcccggctgatagatatcaccactgatgtggcggtggatagcggagcattgctggagcggctggttgcgcagaatccagttagttacaacttccatgtgccactggcggatggcggcgttctgctgggcgccagccccgaattgctgctacgcaaagagggcgagcggtttagttcgctgccgttagcaggctcggcacgtcgacagccggatgacgttctggatcgcgaggcgggaaaccgactgctggcttcacaaaaagatcggcatgaacatgagctggtgacgcaggcgatgaagcagatcctgcgcgatcgcagcacggaactgcaattaccttcctctccgcagttgatcaccacgccgacgctatggcatctcggtacgccgtttgagggcaaggccaacgccggagaaaacgcgctgacgctggcctgtctgctgcatccaacgcctgcgttaagcggtttccctcatcaggtcgcgaaaaagctgattgctgaactggaaccgttcgatcgtgaactgtttggcggcattgtcggctggtgcgatgccgaaggaaacggcgagtgggtagtgacgattcgttgtgcgaaattgcacggtaatcaggtgcgcctgttcgctggcgccgggattgtccctgcctcttcgccagtcggcgagtggcgggaaaccggcgtcaagctctctacgatgttgaacgtttttggactgcattaaggaacgatgatgcgtatacctttcacccgttggccggatgaatttgcccgccgttatcgtgaaaaaggctactggcaagacgtgccgttgaccgatattctgacccgccacgctgacagcgacaagacggcggtcattgaaggcgagcgcgcattcagctatcgccagctcaaccaggccgcagataatctggcctgcagtttacgccgtcagggcatcaaacctggcgaaaccgctctggtacaactggggaatgtaccggaactgtatatcacctttttcgccctgttgaagcttggcgtagcgcccgttctggcgctgtttagccatcaacgtaccgaacttaacgcctatgcgatgcagatcgcgccgacgctggtgattgccgatcgccaacatacgctgttcgccggggaggactttctcaacacgtttgtggctgaacaccgctctgtgcgggtggtgttattgcgcaacgacgacggcgatcacagcctggacgcggcgatgcggcaggcggcggaagatttcactgccacgccatcacctgctgacgaagtggcctactttcagctttccggcggtactaccggcacgccaaagcttattccccgtacccataacgactattactacagcgtgcgccgcagcaatgagatttgcggtttcaacgaggatacgcgttttctgtgcgcgattcccgccgcgcataactacgccatgagttcgccgggcgcgctgggcgtctttcttgccaaaggaacggtagtgctggcgaccgatcccagcgccacgctctgtttcccgctgatcgaaaaacaccagattaatgccacagcgctggtgccgcccgcggtcagtctatggctacaggctatccaggagtggggcggcaatgcgccgctggcgtcattaaggttattgcaggtcggcggcgcgcggctttctgcgacgctggccgcccgtattccggctgaaattggctgtcagttgcagcaggtcttcggtatggcggaagggttagtgaactatacccggctggacgatagtccggaacggattatcaatacccagggaagacccatgtgtccggacgacgaagtgtgggtggcggatgccgacgggaatccactgccgccgggcgagattggtcgtctgatgacgcgcggcccctatacttttcgcggctatttcaacagtccgctacacaatgccagcgcctttgacgccaacggtttttactgttccggcgatctgatctccattgatcaagacggttacatcaccgttcacgggcgtgaaaaagatcagatcaatcggggcggcgagaagatagccgccgaagagatagaaaacctgttactgcgccacccggtggtgatccatgcggcgctggtcagcatggaagatgaactgctgggagaaaaaagttgcgcatatctggtggtaaaagagccgctgcgagcggtacaggtacgccgtttcctgcgagagcagggcgtggcggaatttaaattaccggatcgcgtggagtgcgttgcgtcactgccgctgacgccggttggtaaagtcgataaaaaacaattacgccagcggttggcgtcacgttcaccgctctgaaggagaaagagagatggcaatcccgaaactacagtcttacgcgctgcccaccgcactggatatcccgaccaacaaagtgaactgggcatttgagccggagcgcgcggcgctgctcatccacgatatgcaggattactttgtcagcttttggggccgcaactgcccaatgatggaccaggtgattgctaatatcgccgccctgcgccagtactgtaaggaacatcatatcccggtctattacaccgctcagccgaaagagcaaagcgatgaagatcgcgcgttactcaatgatatgtgggggccgggactgacgcgctctccggaacagcagaaggtggtagaagccttaacgccggatgaggcggatacggtgctggtgaagtggcgctatagcgcgtttcaccgctcgccgctggaacagatgttaaaagataccggacgtaatcagctcatcattaccggcgtgtatgcgcatattggctgtatgaccaccgctaccgatgcgtttatgcgcgacattaagccgtttatggtggcggatgcgctggcggatttcagccgggaagagcatctgatggcgctgaactatgtggcggggcgttccggtcgcgtcgtcatgaccgagtcgctgctgccgacgccggttcctgccagtaaagcggcgctgcgggcgttgattctgccgttgctggatgagaccgacgagccgctggatgatgaaaacctgattgattatggcctggattcagtacgcatgatggggctggcagcgcgctggcgtaaagtacacggcgatatcgacttcgtgatgctggcgaaaaacccgaccattgacgcctggtgggcgctgctttctcgcggggtagagtaatgaccggctttgatttttcagacaaaacggtatgggtgaccggggcggggaaagggatcggttacgcgacggcgctggcgtttgtcgacgccggggcgcgggtgatcggcttcgatcgcgaatttacgcaagagaattatccctttgctaccgaagtcatggatgtggcggatgccgcacaggttgcgcaggtgtgccagcgtgtgttgcaaaaaacgacgcggctggatgtgctggtcaacgccgccggtattttgcgtatgggagcgaccgatgcgcttagcgtcgacgactggcagcagacgtttgcggtcaatgtgggcggggcatttaacctgttttctcagacgatggcgcagtttcgccgtcagcagggaggggcgattgtcaccgtagcctcagatgcggcgcatacgccgcgcatcggtatgagcgcctacggcgcctctaaagcggcgctgaaaagcttggcgctaaccgtagggctggagctggcgggctgcggggtgcgctgtaatgtggtgtcgcctggttcgactgacaccgatatgcagcgcacgttatgggtgagtgaagatgccgaacagcagcgtattcgcggtttcggcgaacagtttaagctcggcataccgctcggtaaaatcgcccgtccgcaggagatagccaataccattttgtttcttgcctccgatctggccagccacattaccttgcaggatatcgtggtggacggcggttcaacattgggagcctgacgatgatctggaaacggcatttaacgctggatgaattgaacgctaccagtcagaacactctggtggcgcatctgggcattgtttacacccgtctgggcgatgacgtgctggaggcggaaatgcccgtcgatgcccgcactcatcaaccgtttggtctgctacacggcggcgcatcggcagcgctggcggagacgttgggatcaatggcgggttatctgatgacccgcgacgggcagtgcgtggtcgggaccgagttaaacgccactcaccaccgcgccatctcgcaggggaaagtacgcggcgtttgcctgccgctgcatctggggcggcagaatcaaagctgggaaattacgctctttgacgagcaggggaggcgctgctgcacctgtcgcctgggaacggcggtaatgggatagttctggcaaagtaaaatgcaattgcagcattaacgaagaaaggaagtgatctggttaacactgtaatgtaaaaaatgggtaacaatccggttttatcatgttgttgtgttgttaattacggtaaaggtgttatagaaacaaaatgtaacatctctctggaacacccaaacggacaacaactatgaataaatcagggaaatacctcgtctggacagcgctctcagtattgggtgcgtttgccctgggctatattgcgttaaatcgtggggaacagatcaacgcgctatggatcgtggtggcgtcggtctgtgtctatcttattgcgtatcgtttttatgggctctatatcgccaaaaaagtgctggcggttgacccaacgcgtatgacgcccgcggtacgtcataatgatggtctggattatgtcccgaccgataaaaaagtgctgttcggtcaccattttgcggccattgctggcgcaggtccgctggtcgggccggtactggcggcgcagatgggctatctgccggggatgatctggctgctggcgggcgtcgtgctggcgggagcggtgcaggactttatggtgctgttcgtctcgacccggcgcgatgggcgttcgcttggcgagctggttaaagaggagatgggcgcgacggcaggggtgatcgcgctggtggcctgctttatgatcatggtgatcattctggccgtcctggcgatgatcgtggtgaaagcgctgacccatagcccgtggggaacgtacactgtcgcgttcactattccactggcgatttttatgggcatctacttgcgttatttgcgtccggggcgcatcggcgaggtgtcggtcattgggctggtatttcttattttcgctattatttccggcggatgggtggcggcaagcccaacctgggcgccgtactttgattttactggcgtgcagcttacctggatgctggtgggttatggttttgtcgcggcggtactgccggtctggctgctgctcgcgccgcgtgattacctctctaccttcctgaaaattggtacgattgtcggtctggcggtcgggattctgattatgcgtccgacgctgactatgccggcgctgaccaaatttgttgatggtaccggaccggtctggacgggcgacctgttcccgttcctgtttattaccatcgcctgcggcgcggtctccggtttccatgcgctcatctcctccggcacgacgccgaagatgttggccaacgaaggccaggcctgctttatcggctacggcgggatgttaatggaatctttcgtcgccattatggcgctggtctccgcctgtattatcgatccgggtgtttactttgcgatgaatagcccgatggcggtactggcgccagcggggacagcggatgtcgtagcttctgccgcgcaggtggtcagtagttggggtttcgctatcacgccggatacgttacaccagattgccaatgaagtcggcgaacaatccattatctcccgcgcaggcggagcgccaacgctggcggtagggatggcctacattttacatggcgcgttgggcggcatgatggatgtggcgttctggtatcacttcgccattctgtttgaagcgctgtttattctgacggcggtggatgcgggcacccgtgcggcgcgctttatgttgcaggatttgttgggcgtagtgtcgccagggctgaaacgtaccgattcgttgccagcgaacctgcttgctacggcattgtgcgtgctggcgtgggggtatttcctccatcagggcgtggtcgatccgttgggcggtattaacaccctgtggccgctgtttggcatcgctaaccagatgctggcgggtatggcgctgatgctttgcgccgtggtactgttcaaaatgaagcgtcagcgttatgcgtgggtcgcgctggtgccgacggcctggctgctgatttgtacgctgacggcgggttggcagaaagcgtttagtccggatgcgaaaatcggcttcctggccattgccaataagttccaggcgatgatcgacagcggcaatattccgccgcaatacaccgaatcgcaactcgcgcagttggtattcaataaccgtctggatgccgggctaaccatcttctttatggtggtggtcgtggtgctggcggtcttctctattaagacggcgctggccgctctgaagattgataaaccgacggcgaatgaaacgccgtatgagccgatgccggaaaatgtggatgagatcgtgacgcaggcgaaaggcgcgcactaatctttttacatcaatagccctctccagaataaggagagggcatttgaatgacaggtgacaacgatgttcgatacgctttcgaaagccggaaaatatctgggacaggccgcaaaaatgatgattggcgtgccagactacgacaactatgttgagcatatgcgcataacgcatccggatcagacgccgatgacctatgaagaatttttccgcgagcggcaggatgcgcgctatggtggaaaaggcggcgcgcgttgctgctgagggttgccaggcctgataaacgcaacgtcaccaggctatattctgaaaaattcaactttttcaaacgccgcacgcagggtgtctggcgttaacgtcaccggtaaatagtggatggattcgaccgggcgcagggtatgcgcgatgaccctatcgatctcggcggtgttatgaatatccacgtccagttcgctaagccgggccggcagatgaaatcgccggtacgctgtaatcaattgcgccagcacgtcatcttgtcccagtagcgcgctttgcaccagaatgccataagccactttcgttccgtgcaggaatttttccgtttgcggcaggacggtcagaccgttgtgtaccgcatgggcggcggcgacacgggtatagcgttccccgaggccgccgaccataccgccgccagcaataatcgcatccaccacgtcgcaaaatgcctgggtcagccgacgctgctgtttatccgctaatgcttgttcgctgctgtccagcaggagatcgcgaatagcgcacgcgctgttaatgcccagccttacggtcaatggcaatgtttcaggctgcggcgcaagcacaacggcttcataccatttcgccagcgtatcgccaatgccagctaacagatagtcatcgggcgcctgcagaataatgcgcggttcgaccagcaccagaaaattggcatcatcaaaaatttcgaactgtaacgcctgtcccgcgtcgttataccagacggaaagcggtgtccaggcggcgcaggttgccgcgattgtcgggatagcgacaaacggcagcgccagacggcgggcgagcgctttggcggtatcgagcagcgcgccgccgccgacgcctatcaccacctgacgatcgtcgttgcaggcgtgcgccagttgggcaacatggcgttcgctacaatggccggtaaacggcagatgctttgcgccagcacgttcaaacgcttccggcaggtaaggccgggcggcggcaatcgcgcgttcgccgtacacccaaacggcgtgggaaagctgttccggcgtgaaaaagtcggtcagtctttcgaggcttcctgcatgggaaaaataattcgccgggccggtaacgacgcggatctcagtgtggttcatgttgtgttgtccttagggtcttctcaccgttgttattatatttagacatctaaacgtcttgattgccaaatactaacaccctgtgatagtgtgtcaacaaccacatcactggcgggtatgaagataatgagaaataacccactgattccaaaaagcaaattgccaaatcttggtaccacgatttttacgcaaatgagcgcgctggcgcagaaacatcaggcaataaatttatcgcaaggcttccctgattttgatggtcctcgttatttgcacgagcggttggcttatcatgtcgcgcagggcgcgaatcaatatgcgccgatgacgggggcgcaggcgctgcgggaggccattgccgataaaacggcggaaatatatggttatcgacccgatgacgtcagtgatatcaccgtcacagcgggcgcgacagaagcgctgtatgcggcgattaccgcgctggtgcgggcaggggatgaggttatctgtttcgatcccagttacgacagctatgccccagccgtggcgctctccggcggcgtgttaaaacgcatagcgcttacgccgccgcattttcgcgtcgactggcaggcgttttcggcgttgcttagcgagcgcacgcgactggtgatcctcaatacgccgcataatcccaccgctaccgtctggcgtcaggcggatatcgaggcgctgtggcaggctatcggcgagcgggaaatttatgtgttaagcgatgaagtgtacgaacatatttgttttgccgccgaaggtcatgccagcgtattggcgcaccctcagttacgagagcgggcggttgccgtttcatcgtttggtaaaacctttcatatgacaggatggaagattggttactgcgttgcgcctgcggccattagcgccgaaatacgcaaagttcatcagtacctgacgttttgcgtcaatacgccggcgcaactggcgctggcggatatgctgcgcgccgcgccggaacactatcgcgcgttacccgatttttaccggaaaaaacgcgatgtgctggttaacgcgctggcgcaaagccgattaaaagtgctgccctgtgaaggtacctattttctgttaatcgattacagcgcagtgtcgacgctaaatgacgttgagttttgtcagtggctaaccgaagaagtcggtgtcgccgctattccgctctctgtcttttgcgccgcccctttcccgcatcagcttatacgtttatgtttcgctaaacaggaatcaacgctgctggccgccgcagagcgcctgtgtaaactgtagttatttaaccgtccacgctctggagaatcgacggtctgcaaaaagctcctgcaggccgttgatctgtttcaggcgcaggacttcatcggcgtccatacctaactcctggccgattttgctctcgtcccagcctagcagagaaagttcgcgcacgatttctgacatggcgtggatctggtggcgcccgcgcgcgcggttatgccgaatggttgccgccatgcgttcgtgacgttctctgtccagacacgttatcggcaggtagcctttcagacgccttttcagggccgcttttcctttgcccagctcatgacggtgaaaaccgtctacaatctcgtactcctccgtattggcctttaccaccacgatcggctgagtaaacccatcttgttcaatcgatttaagcagcagttttttctccggcggcgcaacgttattcgggttgtagtcattaggtgaaatatgatcgtttttcacccacaggacacaatcgacaggctcatcgcgaaaaggactaacgctatgtatcgccattctaaattcattaatggcggcgatcctctcctcttcaggcagttcagagagaaagtgagttatttcggttgtgagtcggtgttgcataagatcccccattcctggcgtttagctttcatacgttcgttataacgctggtaattcttaggttttgtcggactgaatgacagcgcccggcaccagtaatcattgttcagtaatactttgcagatccgtcgccacgacggaatatcgcgcgatccgatatcgccatgctgcgtttgtggaatggtgtgcatgccttttttcttataccactgcaaataaacggcgattttattacggtaatgttcggcagtgacttcaggcatactgtgtagcaggagcagcgcgtactcttcccagttaaggtgatcgggttttaaaattttccggtggccgtaaaaatggctgtcttgtccggcgtatattcctccgctgagtgcgccgctgactctggcgcacatggccgcccagcgctcaggttcgataacatgatacagccataacccctgtcgttgttccgggccgaacggttcgcaaatacgcatgtaacggggcggtactccagcctgatacatcaaattatacaaagggttacatggtttacctgttttggcgaaccaggtccagatatctgcggttttccagtcatagatgggatagatataccaggtgtgccccttaggggctaacgtggtccagggcttatcgtcggcaaagcgcagcttatgcgagttagcgatagcggcaaatcggttataggattcgtcggaacgaataccgaccagcatagcggcaggacgtttttctgaaaaccagtcggcaaaatcgcgaacgaactgttcaaaggtcatgccgtgttgataaaaggaaaaaaaggccggatcggtaatcgcatcttctggcggttgtcgtacccagtcggtacccggctgccaacactgccactccggctggtattgtgaaagggaattttgtgtggttaagggtaatgcgacccaataaaaacgctcaataacgtccgcgtagtattcacgtaacgattcaatataggtgatggtacaggagaattgcgcttcccagtcaatgaagagaacatggatctttttattcattttgcgcgccaacgttgccgtcaggtgcaacataagtcctgaatctttaccaccagaaaatgagacgcagacccggggtaaggtttccagggtccacattatacgctcttgagccgcttccagaacattttgctcgagcggaactttataaaccgacatctctggatagtctccgatgtgttaactacagtatattcgaaataattaacataaaggataagcagattagatgaacttgcaatgctttattatatttgtaaaataaatatattccataaacatatacattaaatttatattaatatccgttatctgaccttcttattaatgtttttttgtgatgtgctcaatgagctcagcaaatccgctattattcagcgaagccctattatacataagatagaattgtatgggagcaatggtaaaaggtatggtgacttttttaagtttgatagaggaagagtaatagtcaaaaaatgtttgtggtaaaaaaccaataagctccgtggagctgatagagttggcgatggtcatcagcgatttgcttctgaaaccaattattctttcccccagcacatcatccataagtgaatgatattctttcataccggttgcccgggagacgagttgcgtaaatgactcttgtagaatttcgtcgatagtggcggtgtcgcctagtcggggatggttttcactgcaaaccaggatgcattctagcctattaaagtgagtacaaacaatagaacgattattcagtggggccattgaaaccacaatatctgctttgcggtaggcaagcagatcttcaggcagttcgtcagtggtcaaaatgtcgtgatgttcaatttcaacctgtggatctttgcggatatatttaactaatttcatcacatattgggtgatcaacagctgtgggctgtagataataaattttttcttcaggctggactgattcattatattaatagtttgttccaggctgttaagattattttctaaatgataatgtaaattaatgcctgttacggtaggcgtaattcctttgcctgaacgaataaatagagggtcgttgaattgcgtgcgcaggcgttgcaatgactggcttacggcagaaggtgtaatatagagtgtttctgctgctttgctaatgcttaaatgttgatagatacattcaaatataaccaacaggttaagatcaaattttttaaggtcgtaaaggttagccatagtatgttcccggcattatcatggtatcttccatgattatgacttaatctcaataatttaccagagttatgtttattaaacttaatgtagagtttatttaaactaaaataccacagttatgaatattttagcgagtaaataattacagtaaaggcggacataacgtacacttttataaccacgccgttagtctaaaaaggctgtgtcggatgacatgctggtctggcgtcgcgttaatgccagtcagaggttggcccgacaaacgtagcgctatcgggcgtggtacggttaagctccagctttgctaatttctgcgttaaggctgccccatcatggcgtccagttgcgctttttccggtaaacccacaacctgttgcaaaatcttatctttattcatgtaataaattgctggcgtcgcgttagcgccaagatcgtccattagctgctgattctgattaatgactttcatctgcgccggggggatggacgccggaacttccagcttcatctttcctgcggaggcttcatagtcatgccaggttttcgccgggtctttcgcggctaaaatcgctgcggctgtggccgggctttccggtttaatcacgccgaccagtaatgtgcgtaattgtaccttgccggattcgacccacggacgagcttgttgccaaaactgcttacaataggggcagaaagggtcggcgaagacatacagcaccaccggcgcgtcttttttaccgtcgagtatccatgacgctttttccattttctgccacatttcacgtccggccggtgcatagatctctttttctatcagggcgttgctaagattttcgcctttttcattatacatatagccggaaatcgcgtgtttaccgtccggcgtcaggtaaatcgtgacgcccatatcctgatactttccgagatagcccttcatgccccccggcgcctcgaaggatttcaggatagttataccctgtttttcaatggctttaaccggcgcaggcagttcttccgcgtgggcgagaatgggcagcatagcaagcagcaatgtacgtttaatcatattttttccttttaatatcaaagcgaaaagagtattaatgatgatgcctatcacagacataggtaagagctggcgtgccaggattgccctttctgtgctggggtgatgtaatccttttcgctgttacagcctttgttaaggtaatgtagagcgcaacacttagccagcatatacgctatggatttcgagttgcagacaatacgtctgtaatttgcaagacgagtcgtactggctctgaagttacctacgggtagttcaggtaatggggccgcctgtcaggcggcctttttactttagatggctgacagggcgcagtgttcacaatgtcgcccgaatcgggttgttagttaacgcttattgatttgataatggaaacgcattagccgaatcagcaaaatttcgttaacttactcctcaacgaaaacacggaggaagtatagatgtccttaattaacaccaaaatcaaacctttcaaaaaccaggcgttcaaaaacggtgaattcattgaagtcaccgagaaagataccgaaggccgctggagcgtcttcttcttctacccggccgattttacctttgtttgcccgactgaactgggtgacgttgccgaccattacgaagaactgcagaagctgggcgtagacgtttattccgtctcaaccgatactcacttcacgcacaaagcatggcacagcagctctgaaactatcgcaaaaatcaaatatgcgatgatcggcgacccgactggcgccctgacccgtaacttcgacaacatgcgtgaagatgaaggtctggcagaccgtgcgacctttgttgttgacccgcagggtatcatccaggcgatcgaagttaccgctgaaggtatcggccgtgacgcgtctgacctgctgcgtaaaattaaagcagcacagtacgttgccgctcacccaggcgaagtatgcccggcgaaatggaaagaaggcgaagcgactctggctccatccttagacctggtcggtaaaatctaaatttccgtcgtctttcacgccatagctgcgttggcgtcgcctgctcaccccggtcacttacttcagtaagctcccggggattctcaggctagccgccttactctgacgtgaaatactttggaaattgtttcagtcatgggcgcacccgcgcccatttcatttcagcaccatgacgcaagttgcattaatgcagtcccgcgaagtcggcttgcatgatgatgttttcagagagggaagaagaatgctcgacacaaatatgaaaacccagctcagggcttaccttgagaaactgaccaaacctgttgagctgattgccacgctggatgacagcgctaaatcggcggaaatcaaggaactgctggctgaaatcgccgagctgtccgacaaagtcacgtttaaagaagacaatactctgccggtgcgcaagccgtctttcctgattacgaatccaggttctcagcaagggccgcgctttgccggttctccgctgggccacgaatttacctcgctggttttggcgctgctgtggaccggcggtcatccgtcaaaagaagcgcagtcgctgctggagcagattcgcgatattgacggcgattttgaattcgaaacttattattcactctcctgccataactgcccggacgtagtgcaggcgctgaacctgatggcggtgctgaacccgcgtattaaacatacggcaattgatggcggcaccttccagaacgaaatcaccgaacgtaacgtgatgggcgttccggcggtatttgttaacggtaaagagttcggccagggacgtatgactctgaccgagattgtcgctaaagtggatactggcgcagaaaaacgcgcggcggaagcgctgaacaaacgcgatgcgtatgacgtactgattgtcggctccggcccggcgggcgcggcggcggcggtctactcggcgcgcaaaggcatccgtaccggtctgatgggcgagcgcttcggcggtcaggtgctggataccgtggatatcgaaaactatatctcggtgccgaaaaccgaaggccagaaactggcgggcgcgctgaaagcgcatgtcagcgattacgacgttgacgttatcgacagccagagcgcaagtaaactggttccggccgcaacagaaggcggcttgcatcagattgaaacggcgtccggcgcagtattgaaagcgcgtagtatcatcatcgccaccggcgcgaaatggcgcaatatgaatgtgccgggcgaggatcagtatcgcaccaaaggcgtcacctattgtccgcactgcgacggtccgttatttaaagggaagcgtgtggcggtcatcggcggcggcaactctggcgttgaagcggctatcgatctggcaggtattgtagaacatgttacgttgctggagttcgcgccggagatgaaggcggatcaggtgctacaggacaaagtgcgtagtctgaaaaatgtcgatatcattttgaatgcgcaaacgacagaagtgaagggcgacggttcgaaagtggtgggactggagtatcgtgaccgtgtcagcggcgatattcatagcgtcgcgctggcagggatttttgtgcagattggtctgttgccgaatacccactggctggaaggcgcgcttgagcgtaaccgcatgggcgagatcattattgacgccaaatgtgaaaccagcgttaagggcgtcttcgccgcaggcgattgcaccaccgttccttacaaacagattatcatcgccacgggcgaaggggcgaaagcctcgttgagcgcctttgattatctgattcgcaccaaaatcgcataaaaagaagtaagcacacctgcaaggccagttaactggccatcgtaaatggcccgatagtgtaagctattcgggcctgcggtgtttatgcctggggaacgcaccgggtaaaacaccttcttcattatcaatactctgaaaccgtctgttaataacagacggttttttatttcaacggtattctgtttttaaactttgaaacaataaaaaagccttctacggatttaactggaatttttctgtttttttatcaaagaaagattaagcgcttccgttaacatgcccattcttttttcttgatttatattgcatttgtatgtgaggttatttattcatggattcaatctatgaatcactgacggaattagaaaaaacagggcttacattgcgtgatttttttaattctcatgatagtcgttcactgaaatctgcctacgtgagattaaatcccactgctgcggtaaaccttaccgatcgggcgtggctggaggcggagtatgactttaatgcgctattcgtcggtcctggcaagctgctggctgcgcctttcgcttcagtgtatctggaagatgatgcgctggtgatgggaaaggcgacgctggagatacgggattttatggcagcgttgggattatcggttaatcaggagagcaatatccctgacgatcatatttcctgcgtgctggaattgaccacactattactggctaatacccggcaaacgtcaccataccgctctactctcactcaatatatcaataactatttaacaaagtgggtgccattatatatcgaaaaaataaaaactcatgcacaaacgaccacgttatatacggtggcggacatcttattttattggcttgctgaattaaaacgagaatatcaatatgagtaatgagacgggacatctgaacagacgttcttttttaaaggggatagtggcactgggcgccgttgcggctttacccggaggattactgacctcccgatgcgcgcttgcgcagccgcctgttccctttaaccctaaaacgtacaaaatttatcgtaacgcgtgtccgcgtaactgctatgacacctgtagcctcaagacatgggtaaaggacggggtcattactttcgtggaaggtgcgccggaatcaacatttactcacggtaccccttgcgtcaaagggttaagctatccgcgccgggtttatagccccgatcgtattaaatatcccatgacgcaggacgttcgcggtagcggcaactggcgtcgcatctcatgggaagaggcgatgcagcgcattgccgccaaaatgctggagattaagaaaaaagacggttctatgctcggtctggcgctgaccaaatattccggtaagtttggcgtgctgaactatgccgttgaagggatgatgtcctcgcttggctataccacccgttttgccggtacgccgtgctggcctgccggtatcgacgcgcaaaactacgacatgggcgacatgtggtgtaacgacccggaagatatggtgaaagcgaaatacatcattatctggggcgccaacccggcctggtgctcaatgcacagcatgaagtacatctatcaggcgcgcgagaaaggggcgaaggtcgtggttatcgacccgctgctgtcgcagactgctgccaaagccgatctctacctgcgcgtacggcctggctcagacggtgcgctggcgctgggaatggcgcgtcatctggtggataaaggcctggtggatcaggattttgttaacaacgatgctcacggctatccggaatttgaagcctatctgcgtaaccatgtaaccgtggagtgggcggcagaaatctgcggcctgtctgcggatgtcattcgccagctggcggaagagtttacggcggttaagccggccacggtctggattggttacgggatgcagcgtcatgtcaacggcggcgccaacgttcgcgctatcgatgcctttgtcgctatgtccggcaacatcggtgtcgaaggcggcggcgcgcgttatggccatctgcatacctggggctttaactataacgccatgctgcagaagccgccggtgggcgctattggcataccgggagcggcgggcaccaccagtgaattcggggctgccgctggcagcgacgccgtgcagtactccgatcgctctctgaatatcaaccagacggcgcaggggattctggaggccaacgatccgccggttcgtatgctgtgggtcgcctgtaaaaacccgtttgcccaggatttcgatcgcagcaagatgaaaaaagcgtttgaaaaactggaaatggtggtctgcgccgatcagttcttcaacgaaacggtgcaacacgctgatatcgtgctgcccgttaccaccgcgtttgaagagtggaacgtggatgcttcttactggcactactggctttccattaatcagccggcgattaagccgatgtatgaagcaaaatgcgaccttgaaatcgctaccatgctgtcgcgcaccattaataagatggcgccgggttcctgtaccttcccgcaagagttcgatcacaagcgttggctggatcaggagttcaacgacggtatggcgaaaatgttcggcatctcttcctgggacgatctgctggacgggccgaaaaaagcgattctgccaagttcagccgcctggtacgatcgcaagttcaaaacgccgtcaggcaagtatgaatttaaatctgaactggcggagaaaaacggccacaccgcgctgccggaatacaaaccggaagccgagagcaaactgccgttccatctgtttacgccgcacgtgcagtttggcctgcactcgcagtttatcaacctggactggatgcaggtgttctacccggaaccgttcgtttatatccatccttcttccgcgaagaaaaagggcatcagcgagaacgatctggtcaaagttttcaatggcaccggtgaagttgagctgcgggcaaaagtcaccaccaacgtgccggaagattttctggtgatgtatgaagcgtggttcccgaaacggcagtacaacgtgcaaaacgtcgtggccgatacgcctgctgatatggggctgatgaaaactggcgcgccgggcgccgctatccacagtcagtttgctgacgttgtattgatcggtaaaggggaatccgtagcatgagacgtgcgtttttagtgaatagcgataagtgcatcggctgccgcggctgtgctatggcgtgtaaaagctttaaccaactggagccggatcgcttctggcgctacgtttatccgttggataaagacatctatccacatgaagagcgggcgttttactcgctggcctgtaaccactgcgaacatccggcctgcgtcgccgcctgtccggtcgaagcctataccaaacgtgaagatggcgtggtggtgcataaccctgagcgctgcatcggctgtaaaaactgtattcgtaactgtccttatggcgcgccgcgttttaatgaagagacgcgtaaagcggaaaaatgcagtatgtgctacgagcgtcttgatatcggtatgaatccggcgtgcgtaaacgcctgtccggtgggcgccttgtcgattatcgatttggatgccgatcctgtgcccgataatgcggtgcagtatccgccagggttcccgcatatgccacagcttaatccaggaacgcgctttattctggcgcgccagcctaagcagccggaggacaagtaatggaaaaatatgaactgccgctggtgttttttacggtattaagccagatgtctgtcgggatggctttggtactgacatggcgtacgctgcgtggtgaagtggaaggccagcgtttctattggttggccaccgggctggtgctggcattggcgtctattgccgcgattctgcatctggcgcatcccgatcgcgcttatgatgcgctgattaacctgcgacatgcctggttaagtcgggaaatcctgggcgccacgttgtttggcgcagcggtcggcgtaacgttcctggcaaagggacataaagcgatggctcttatcgcctccgtgttcggcgtgttactggtggcggtgcaggggatgacctacgccgcgccagcgatggtggctatcgctaatggatttaccatgctgttattttttattacggtatgggtcatgggttgcgcggcgattccgctgttaaaactcaggcctgccgttcctgcgttacgccaggggattgtggtgtgtatcgcggtacttatcgcggcgccgctggtgtggttaagcgggggaacggtaatgcagatgacggcgcgttcatggctggcttcaccgttttatctggcaagcctggtctgccttgcgctcgcttttgtcgccagccgtcacggtgattcgcgcccgaaacgcctgttcgtcttgttattcgtcggcgtatttctgagtcggctggtcttttttggcgacacggtgagtactattgtgaatatcgggcatttgtactaacgatgatgcagtaaaaagccctgccaggcgtgacctggcagggcgtgtaagtttttagccaccagagttaacgcacaaccaatacgggcagcgtcgcatggcgcaccacgcttgaggcgttagaccccaacaggtgtgtcgtgatggacggattacgcgaaccgattaccacgacatccgcatccagttcttcgcccatctcattgacgacatcgcgcacgctaccaaagcgaacatgcgttttaattcgtgaaggatcgatactgaagtgtcccaccatcgtttgcagacgcgtttccgcctcatgctgtaaatgttcttcaaagcgacgcacgtcggcggcaaagcggtgcagactcatgctcgcggacccaggcagtacatgcaacagatgaatgacgccatcctgttgcgccagaaactcagcgtggcgaatggctttatcgctaagttccatttcaaaaacatcaaccggcataatgattgtcttatacatacccgttactccctgttaatcaatactgaatttattcaagcatataataatgtttctttctgctatttgtctggcaattttaaatattacggcaacctgatgttaaaaaagttgtgtattttccaggaaaaatcctaaagccgcctgttttgccggcagtctctccgggatagctacccttttatagtcgaacgtgacattcaccgttaccccggaggctgcatgaaagcattgacgtatcacggtccacatcacgtaaaggttgaaaacgtacccgatcccggcattgagcagcctgacgatatcattttgcgtgttaccgccaccgcgatttgcggatctgatttgcatctctatcgcggcaagatcccacaggtaaaacatggtgatattttcggccatgaatttatgggcgaggtggtggaaaccggacatgatgtgaagaatattcggaaaggggatcgggtcgttatcccgtttgtcattgcctgtggtgactgttttttctgtcggctacagcaatattcagcgtgtgaaaacactaacgacggacacggcgcggcgatgaataaaaaacagatcccgccaccggcggcgctgtttgggtatagccatctgtatggcggcgttcccggcggacaggccgaatatgttcgcgtgccaaaaggtaatgtcggtccatttaaggtgccgccgctgttatctgacgataaagcgctgtttctttctgatattttgcctaccgcctggcaggcggcaaaaaatgcccagattcagcaaggtttcagcgtggcggtttttggcgcagggccggtaggattactgactatcgcctgtgcgcgactgctgggcgcggagcagatcttcgtcgttgatcaccacgcctggcgcctgcgtttcgccgaagaacgttacggcgcgataccgatcaacttcgatgatgagaacgatccggcggaaaaaatcatcgagcagacggcaggacaccgcggcgtggacgcggtaattgatgccgtaggctttgaagcgaaaggcagcttgacggagacggtgctgacgaaccttaaactggaaggcagcagcggcaaagcgctgcgacaatgtatcgcggcggtcagacgcggcggcgtggtcagcgtgcccggcgtgtatgccggttttattcacggctttttattcggcgacgcctttgataaggggctaacttttaaaatgggtcaaacccatgttcacgcgtggctgggggaattattaccgcttattgaaaaagggttgctgaagccggaggagattgtcacgcactatatgccgtttgaagaggcggcgcgcggctacgaaattttcgaaaaacgcgaagaagagtgccggaaggttatcctggtgccgggagcgacgtcggcacaagcggcgcagaaacaggcgacgggagtagtcaacccgatgccaggcggcgttgtctgaagcaggcagaaatgaaagggctaacggaaagaggatgcgcaggcatcctctgtgtaaacgcattaacgcttatgcagatgatttaacgcaggaagtcgcccgcggcttcaggctgatattcgagttccagcacttcgagatgggtggaggcgccgcccggcagttcccagtgaatggtgtcgccgacgcgcagtcccagcaacgccgcgccgacgggcgccattaccgaaagctgggtactgctgtccgtcatattggcggggtacaccagcgtccgcacgcgtgtttcaccatcgctcaaattgcggaatttaacgcggctgttcatggtgacgacatcgttcggcatctcttgtggcgaacacatttgcgcgcgatccagttcggcgttgagcgcgtcggcaatcggcagatccgcatacgcaggctgttccagaagacgatcaatacgttcggcgtcaaggtcgttaatgataatagtgggtctggacatttcttactccatgtcatcgatactgcgagtagtgcaggtaaatggtcccaaaagaaaaccctcaccgtctggcggcgagggtttaactctcatgatgatactgagacttaccccgtctttgaagtgatttagttcacattcgggtaaatcctcaaacgtcatagccctgagtgaattttagtctacattcgggcgtgttctcaaatgtggctacggttttaaacctctgcttcgtcaataaccggctttatcgataataaactgtttcccgcagttgccgggatgcggctgcggcaggaatgaggcagaggagagcggggcgttaatcatcgacgcctttaatgaaaactgaatctctgttaaataggcgggattgccatggcagtttactttaacggctttgacattatcctggccccacatttgtgcgacgacgctatcaaactcagcgcggctaacggttttgccgtaattatccgtcagaaactgccccagtgcgctgtcttttatcgccttatccagccgtatcatggtgccgaaataggcattgggatcaaacccgaaacaggcgccatgtttggcatattcgtagcgctccagacaggaattcccccccgcgccgggcatcacttccttaagcgctgccgcgatgtcaggcgaaagtccgggggcggaggctgagcatttccggctggccttgacttcaggcagattcgggattggccgcgtcgcacaaccaaagcgctgccagcgtctctggtcaacaccgcgtgcggcgatagatttgggtaatcctggccacaggccgtggacggtcagaaagtctgctttgttggctggctctttttgcagacggcactcatcgggctcccgatggcggcgttcatgctggctttgacaaaaaccggtttgccaggaaagcgccagcacatagtcagtgaaatcaccgtactgttgcgcctgaagttcgtcggcgttggcggcaaaaatcggggttaagagggcagccagcagcggactgtaatgccatattgtgttcatgatgaattcgataatttatacacattatgaatgttacccatttaatcataaaaaatgccgctcaggtgaacctgaacggcatcatttttaacctgcgttggcgtaatgtttaattccacattgccaaaatcggccagcccaccagcaacagcatcgcgatatagataacgccaaagattgcgccaagccgccagtagtctctggatttcacgtaaccgcagccgtagataatcacaccagggccggtggcatacggcgtcagacagcccatgataccgatagacagcaccagcagaatacacagttgttccatcggaacgcccggaatgcctttacccaccgccagaatgaccggcagcatggtcgcggtgtgagcggaaagactggcgaacagatagtgcgcgaaatagaacaccagtaccagtacaatcacggttgcatccggagagaaaccttccagatgcgtactcatggtattggcgaaccagtcaataaagccggagcgggttaagccattggccatgaccaccagcgtagcgaggttcaccagggtgttccaggcgctgttgtagcgcgtaatatctttccacggcacaacatgcaacgccagcatcagcgagacggccagcagacccacggcagtggcgttgatgatttttccaccaaaaacccacaatcctaagctaagcagcaccaggccaatcagcgtccactctttgcgggacagacgccccatgttttttaactcgccgccagcccaggccgcgacttccgcactgtgggtcacttcaggtttataaagtacataggagagccacggcgcaacgatcagtaaaataatccctaccggcagaaagctgagaaaccactgcagccagctaatctggacgccagcgatcttgctgacgaactccagacctaatacgttcggggccgcgccagtgacaaacatcgaagagctcaggctggtactgatcaccatcatccacatcaaataaccgccgatgcggcgtgcggaaggatcgtttggaaacgatttaaacagcggcggcaggttcttgatgaccgggaagacagtcccgccggtacgagccgtattggagggagtaaacggcgccagcaaaatatcgataatgacaatcgcatagccgagcgtcagcgtgcgtttacccatgaattttaccaaaaacagcgcaatgcggcgccccagcccggtcacttcgtagcccagcgcgaaaataaacgcgccgaaaaccagccagaccgtggtgctggagaaaccggcaagcccccatttcagcgcctgtttactggctttaaacgccggatcggccagttctgaagcgtcaaatagcaggtaattgctgccgataacgcaaatggttacggcgataaaactgatcgctgtcgccgggatcggctccaggatcataccgacaatcatcgcgacgaaaaccgcaaaatagtgccaggcctgcggcggcataccatctggaacaggaattaacaacatgacgcccatcaccactaatggggccaacaacttccatatattatctttggataaagacataaatgactctccggaaaggatattttctataattgtgttaatgattaacttgcgaaatttgcgctaaaaaccaggtcacgatcagcagatcggcgctaccgcctgggctgagattgcgttcaatgcattgctgatcgaaccggtggagataaacgagatcgtcaggcgtccgtatgccgccctgctgtaataagaccgcagcctgctgctgtaaccagcgcagaccgtccgccccgccgcgcgacgcgacgttggtatcgccgttaagcgacatcagcagcagtaaggtatcaagcagcgccagttcgggatcgcgcccctgcgccagcaatgcgcggtagtgcggcaacgcgtggcggatgaccagcggatagcccgcttccgcttcaccgcgcgcgccggttaatcccagttgctgatacagccgctggcctgcggtgagctgtaggttgttctggcgcagttcgcgcgttgtcaggccgcggcaaaaatcggcggcggtagcgcagagtgtttctgcggcgatcggctggcgtagctgatacaggcggccaatggcggcgcacagtaaccccagcgagaaaatgctgcctttatgggtattgacgcccgccgttgcgcgaaacatcgctgcttcacaggccatccccaatggacgcaggcccgccagaactgactctggcggcaggcgcgtgcagctggcgccatattccataaagcgcggcagccagtgtcgaatcgcctccgcgctgcggtgaaaatccgccagcgccatatctttgtgcgcgccgcagtttagtcggtctaccagaccgggttttggcgataaatttacctcggtcagcatggcgcgccaggccaaatcggcccagacgtcatacagcgactgaggctgaatggaggcgttagtcgggttggcgggaatcggcatcatgcagcagcgcctccatatgaatcagtaaatcagtcagcgcgtgggttttaccccgcgcgcattcagccgcgctttgcccgcacagcagacagcggcgagcgggaagcgcgaaatggcggcgggagagtatttcgccttccgccgtcaggacatcgatatcccacaggcgccccagtggataacgctgttcaagcgcgatggtcgcctgtttgagcgcctgagcgggcgcgtcaatcgccagcagcccttccggcccgctggcggaagccagtgcagcctgctcccggatagtccagccatactcttctgccagcgtgtgcagggcagtcacgccgtgattaaagatccggcgggttaacgcgctgtcttttatcgggcctggcgccaccacggtaaaggagaccagtggagtggcgtggcgcgttagccaggcgcgctgtcttgcttgtctctcatcccggctggcgagcagctcaggaatagaaacgtcgtgacaggtggcgagttcaggaaacaggcgcatggcttattccttcacctgatgcaccacatcgatcactgaaccgtcgcgataacgcacgacagcaatcacgcggtcggtgaattcgatagggcggggctgaccggtaagcagttgcgcgcgttcgcgcagccactcaatcgataccactttcattcccgctgctttcaggcgttcagccagctccggacgcgccggattgacggcgataccgtgatcggtgaccagaatgtcgacgctggagcccggtgtgacgcaggtggtgacgttatcaaccagcgttgggatgcgaccgcgtaccagcggcgcgacgatgatggacagcgccgccgcgacggcggtatcgcagtgaccgccggacgcgccgcgtagaacgccgtcggagccggtcagcacgttaacattgaagtgggtgtctacttccagcgcgctcagtaccaccacgtccagacggtcgacggaagcgcctttagagccccagttggcgtactggttagcgctgatttcgatatggttcgggttgcgagccaaagattgcgcagcgttacgatcgaagctctgaacgtcaagcagtttgcggattaagcccttttcatgcaggtcgaccatggtggcggtgataccgcccagcgcgaaattagccacaatgttgcggctacgcattttgtcttccaggaagcgggtgaccgccagcgatgcaccgccggtgccagtttgtagggagaaaccttcgttgaagtagccggagtgagcaatgacttccgccgcgctgcgggcgatcagcagttcacgcggattagtggtcatgcgggtcgcgccagcgccgattttgtttgcatcaccgacttcttcgatttgcacgatcagatcaacctgatcctgagcgatgcttgccgggttatgcggatacggcagcagttgctccgtcagcatcacgacctgcttcgcgctgtcggcatccaccatcgcgtagcccagtgaaccgcaacaggctttgccggtataaccgttagcattaccgaattcatcgcaggagggcacgccaagaaatgcaacatcaatattgagttcgccgctttgtaccagatgtacacgaccgccgtgggagtgaatctgaaccggctcagccagcaagccgcgagaaatttcttccgccagcgggccgcgcaggcctgacgtgtagatgcggctgaccaccccgttacgaatgtgttcaaccagcggcgcatggcagtcgctcagcgaactggaggccagcgtcaggtttttgaagcccatcttcgcgatggtttccatcaccaggttaatcgtcagatcgccgccgcgaaacgcgtggtgaaaggagaccgtcatgccgtcgcgtaaaccggaacggcggatggcctcttccaggctggcgcacagtttgtggtcgcgcggtttttgcgcttgtagatccaattttgccgcactttggtaagcgctcagttcgctttcagcgtgacggctccaggctgctacgcgatcctggcgttgagattcatttttctgcgtcatttttttgccttattcttcgcgaataccggaaagttctgcacgggagagcaccagacgggcgcgttcaatcaccgggctgtcgaccatcttgccgttaagggaaacgacgccgagaccttcgcgggcggcggcttctgcggcttcaacgaccagacgcgcatgggcgacctctttacgcgttggcgcataaaggttgtgcagcagttcgatctggcgggggttgatcagtgacttaccgtcaaagcccaactgtttaatgtgggcggcttcttgcaggaaaccggcttcgttgttggcgtcggaatagacggtatcgaaggcctgaatgccggcggaacgcgcggcctgcaaaatggcgcagcgggcgaacagcagttcggtgccttccggagagcgttcggtgcgcaggttgcgaacatagtcttccgcgcccagcgcaatcccgatcaaccgttcagaggcgtgggcgatttctaccgcgcgggtaatacccagcggcgattccacggcggctaacaggccggtactgcccggttcgcgaccgcaggcgttttcaatgcgcagaatttcgttttcgatatcaatgacgtcctgcgcggtgtcggttttcggtaaacgcaccacgtccgcgccgccgcgcacgaccgcttccagatcgttgacgccccattcggaatccagcgcattcacgcggacaatggtttcgacgtcacggtaaagcgggtgttgcagcgcgtgatataccagacggcgcgccgcgtctttttcgcgtaatgcaacggagtcttccaggtcgaacatcagcgcgtcggccgggtagataaacgaattgctcaccatcgccgcgttggcgcccggtacgaataacatactgcggcgggtgcgggttttacgttgttgcagagaggcggaaatcattggcgatcctcccagggcagagcggcaataccgctggcgcgcgccagtagcgtttccagtcgggcgcgcaaaatgcagtccagagcgcctttatcatcgacgttcagttgtacgccgcgcacgtcgtagcgagaaagcacctccaggatggtggcgcgaatggcctcgccaaactgtttttcaacgctactgttgatttgcaggtcaatatcctgcgtatcgagcggcgcaatgcgtatcatcacatcgccggactcaagcgtgcctgcgacggctagctggtttattttcatttttcacctgttgctaatacgggggacttttgacgggctgccgcgctgcccggatggcgttcgaccatgccctgcaaatagcgcagggtggcgtcgggaaccagcggcgcgatagccgtgagatcgtgtttaaccagcagcttgcgtacccaggaggcggatatcggcgtctcctggaagcaaagccgctctatttccaccagcgtaatgggtggggcgggaagcgttggcgtctccagccagaaacgcatatcaaggttgtactgggcggtaacggtgcaaaacggctccgtaccgacaaagcggtgtgtgatgccaagcgcgggcgccagatactggcggaaaatcttcaggtcgatttcggtataacagtgattaataacgctctgctctttaatgaaatagcaggggaacgtcgcacgagaaataatgtattcggagccgcggtgaacggttaagcgcgggatatcggtggtccctttaaggaccagatcgagtcggtcttcatagggaaagcgtgatgtatcttctttgaccaggaacagatgcagccagtcgcactgtgccgccgcctgttggatcagatagcgatggccgttcgtgaaaggattggcgttcatcacaatacagccaattttctttccctcatgacgcaatgtcgccagcgattccgcataccgtttcaaccgggtcgcgctattttccattaagaccattacgccagggacgctggctatcgtcgaaaagctgcactgtttaaacagcgcttcgtattccgttttggtataaataaaaagatgggtgcagtgccgctcccaggcgagattaatcaattccgtcgccagcgttaacgctaagccttcgccgcgtactgattcgctaatggccacgcatttaatgatatttccggcaataccgccgcaggcaataagacggtcatcacggctgacggtaataaacacttctacagtggtatcgacgcttaaatcattctctttgagaaagtgagcgatctccgccatttttttattttcagagcgttttacccgagtgaatacattattgccaaacatagtaagaaatatcctggtgatatgcttgttgccacttttctgtatatgttgcgctgtgttgcaacttgataactttttcttttcagtcagagtaggagtttttttatgacgagttatttatttttctctctgacgtatacatcgtaaggagtattttggtggtaaattttgatttatttcacaaagcgttagatggtttttaagtgttttatggttttaagttttttaattaatttaatcgccattccggcggtgggttttagttgtttaattgatttaatgtggggaatctgtaacgattggtttttatatgcttcaagatgctcaaaacatttttattacatttgcgataaatctgaagagaaatgcccataaggaaccttaatgtcctgtcagaaaaataaaaagctgtttcctttttttcggcaactcgcgtttccgttacgtatttttctgctcattctggtggtttctgttttcatcgtggcagcgttagcacaatatttgtctgccagtttcgaagattatctggcgtcccatgttcgtgatatggcgatgaatcaggcaaaaattattgcttctaacgacagcattatcgctgccgtaaaaaaccgggactataaacgcctggcgataattgcgaataaactgcagcgcgggacggattttgactatgtggtgataggcgatcgccactcgatccggctttaccatccgaatccggaaaaaatcggctatcccatgcagtttacgaaacccggcgcgctggaaagaggagaaagttatttcattaccggtaagggctcaatagggatggcgatgcgcgccaaaacgcctatctttgacaacgaaggcaacgtgatcggcgttgtttcaattggctatctggtcagtaaaatcgactcctggcggctggacttcttattaccgatggcgggggtttttgtcctgttgctggtggtattaatgctgctttcctggtttttcgccgcgcatatccgccgacaaatgctgggcatggagccgaaacagattgcgcgcgtggtacgccagcaggaggcgttatttagctcggtttatgaagggctgatcgccgttgatccggagggacatatcaccgcgattaaccgcaatgcgagaaaaatgttggggctgccgtcgccggggcgtcagtggctgggcaagctgatagcggaagtcgtcaatccggcagacttttttacctgccagatcgcagaaagacgccaggacgtgatggccaacttcaatggcctgagcgtcatcgccaatcgtgaggctatccgttccggcgaggagctgctgggcgctattattagttttcgcagcaaagatgaaatcgcgacgttgaacgcgcagctaacccagattaaacagtatgttgagagcctgcgcacgctacgccatgagcacctgaactggatgtcgactctgaacggcctgctgcaaatgaaagagtatgatcgggtcagagagatggtgcagggtgagtcgcaggcgcagcagcaacttattgatagtttacgcggcgccttcgccgatcgtcaggtggccggtttgctgtttggcaaagttcagcgcgcgcgtgaactggggctcaagatggtgattgttcccggcagccagctacatcaactgccggaggggctggatagcacggagttcgccgccatcgtcgggaatctgctggataacgcgtttgaggcgagtttacgtacacaggaaggcgacaagaccatcgaacttttcctgagcgacgagggcgacgaggtggtaatagaggtcgccgaccagggctgcggcgttcctgaagcgctgcgggaaaaaatttttgaacagggcgtaagtacccgaaccgacgaacccggtgagcatggtatcgggttatatctgattgcaagttatgtggggcgctgtggcggggtcattacgctggaagacaatgatccttgtggcaccttattttctttattccttccgaaagtgaaaaaaaacgatgacagaaccattaaccctattgatcgttgaggatgaaacgctgctggcggagatgcacgcagaatatatccgccatattcctagctttaaccagatatggctggcgggcaatctggcgcaggcgagaatgatgattgaccggttcaaacctggattaattctgttggataattatctgccggatgggaaggggattacgctgctgcatgaattaatgcagtcgcgctatcccggcggcgtcgtgtttacgaccgccgccagtgacatggagacggtagcggaagcggtacgcagcggcgcgtttgattatctggtcaaacctattgcttatgagcgtttggggcagacgctgacccgctatcaacagcgcagacgtatgctggcgagcgcggatagcgcaagccagaagcagatagatgaaatgttcaacgcctatgcgcgcggcgaaccgaaaggggatttgccgaccggtattgatgccttaacccttaatgcggtgatgaggctgtttgccgatccaaccgtacgccatacggctgaaacggtcgcgcaggccttaacgataagccgcaccacatcccgacgctacctggaatattgcgcgagtcagcatctgattgtcgcagagattattcatggcaaagtgggcaggccgcagcgtatttaccacggcggctaagcctggtttaagatgccggggcgatgttttccctcgccccggcttaccggctatcagccgccagtaacgctggaagaggcgcctggcaccataatttccgtggcgataatgacgatcaacagaccgacgataaccggaacggacgtgcgcttcaccacttcaaacggtgatattttagccatcccggcgacagcgaccacgacgccggagaccggcgaaatcgtgcgccccaggtttgaggcttgcagcattgggatggataaataggctgggttgataccggaggagtgcgccagtttagggatcatctcaacaaaggcgtaaaaaggcgcattgcctgaaccggtggtcatcgcggccagcatggttaaaatcactaagaccagcatcagaataatgctggcggagccaaaagaagtggcaatcgagatcagactttggataaagccaatggtgctcagcccctgggcgaaaacgcccgccgcgaccaacagcatcacaacgccggcaaacgcatccgccatgccgcgataagccacttccaggccggaaaacacattttgcgtgttgaaaccgcgcacgaattccagcacggcggccagcagcatacagatcaccagaatggtaataatgtgcaactgcggcccccatttaccgtcaaaaatcagtacgccgataatgggcgtgaacggcaaaagggcataaaacgccggggccgtggtggtaatctccgccacgtccagcatctcatgtgaaatgttctcttttttatccagatagcgttgccagaaaaagtgcgcaatcgccataccgataatggcggcgatggaaattggcagcgtagttttgaacgcgaaatcgattaacggcatctccgccgcttttgcggctaaaaccacatcgccagacgttggcgagaggatgatggcggccggagaggcgcaaatagccgccgccgcgccgcggctaatgccgacgttgaccatcaccgggaagagagtagccatgagcagtacgccaagccccgtcgcggaagagacggccagcgacatcaggcaggcgacaaaataggcggcaatcatcaacaggtagggcgagtttatgtactgtaaaggtttcgacgccagcttcacgaccatatcattcgcgccgatatgcgtcatataggcggcaaagccgcacagcatcatgatcatcatgccaagatcgccgccgcgactcataagcaaaattttgatgtattcaacaatatctgttgcggtatagccggtactggtttcgctggcaggtaataccttatgccccatcagcgcgctgataataagcagagccagaccgccgacaaataaaacgccagtggcggaatatcccttaatgatgtagcgcgctacacccacaataacgacgactccgataaggagctctataactgttagcattgtttcccctgtcttatcgacacccagagtaaaaataagaaccacaaaagtggtataaaaatgtaccgaataaaggatggcgccttactgattaaaatcacggcgcggttattttttcatgtcattgctaaagatgaaatatacttatacgaattttctgtagcactataagtattaatttattgttattttattgttttatttgttgtgctttgttttgtgttttttgtgaaagcttattaaggagcgcgtgacggttctgagtgctaaatcaaacgccgttaacccgatactctctcagattattctctgtttatagtttgttaagattttattcaggttaatgttgttattatcacagtcgaatttttgaacggtatgtatgttgcgatgatcatcagaaagtattttcttattattgctctccttttgatgccatggctggctattccttcagtctctgcggcggataaaggggggtttaacacgtttaccgataacgtcgcagaaacgtggcgacagcctgagcattatgatttgtatgtccccgccattacctggcatgcgcgctttgcctacgataaagagaaaacggatcgctataacgagcggccgtggggcgttggttttggtcagtcccgctgggacgacaaaggcaactggcatggcctctatatgatggcctttaaagattcatttaacaaatgggaacccataggcggttatggctgggaaaaaacctggcgaccgctggaagacgataattttcgccttggactgggctttaccgcaggcgttaccgcgcgcgacaactggaattatattcccatccctgtgctgttgcctttagcgtcgataggctatggtcccgctacctttcagatgacctacattccgggttcgtataacaacggaaacgtctatttcgcctggatgcgtttccagttttgatggggaagggtatgcttcagttgtgaattaaaaagtcttaaaaaacaataagtagatagagttagctaaaaattaacgcgatatttatcactttttcgcaaagttcgactggacaaaatgcatcacaattgttgtactggtatccgacacagcatttgtgtctatttttcatgtaaaggtaattttgatgtctaagattaaaggtaacgttaagtggtttaatgaatccaaaggattcggtttcattactccggaagatggcagcaaagacgtgtttgtacacttctctgcaatccagaccaatggttttaaaactctggctgaaggtcagcgcgtagagttcgaaatcactaacggtgccaaaggcccttccgctgcaaacgtaactgctctgtaagcatacgtccgacagcaagatttcaaaacccgccctttcggcgggttttttttgcgcttaacgcgccgctgcggcggaaaatagccagaatgccagcgccgtcatggcaaacgaacctaacaggttaatcagcacattcagcagcgcccagccaaagcgcccctcttgcagcaagaataccacttcggcagaaaaagtagaaaaggtcgtcaggccgccgcaaaagccggttgtgatgagcactttccacatcggatcgatatgtgtcatgcggttaaaccaggcgaaccccatgccgataataaacgcgccaagcaaatttgctgttagcgtaccgatgggaatcgcctgatgaagcggattaaaacgcatactgagcatccaccgggctacgctccccgttccaccgccgataaaaactgctaaaagaagctgtaacactgccgaatcctttatttaattgctatacaagaggagtgtaacgccgaacacgcataattggcgagtcctgacagaggtgtgggaggggatatgttcgttgcagccgggcagtttgtggtgagttctgtatgggaagagaatgcgcaagtttgcgtttcgttaatggctcaggcggcgggccgcggcgtatcgcttctggtgttgcctgaggggatattagcgcgagatgacatcgaccttgacctgccgattcgcgccgcgcagccgctggatggcgcgtttatgacgcggcttctggaagaaagcgctcataataatatgacgacgatattcactatccttgtcccgtcaacgcctggacgggcggttaatatgctggtggcgctacgggcgggtcacattgtcgcgcgttacgcgaagctgcatctctatgatgcgttttcgatgcaagaatcccaaagtattgatgccggaaccgttatcgcgcctgtgctggacgtggagggggttaaggtggggcttatgacctgttatgacctgcgctttccggacatggcgctagcgctggctttacagggggctgacgtattggcgctgccgacgggctgggttcgcggcccgttgaaagagcagcagtggtcgacgctgctggcggcgagagcgctggataccaccagctatatgattgcggccggggagtgtggtaatcgtaatattggtcaaagtcgtattatcgatccgttgggggtaacgatagccgcggcagccgatcgtccggcgctgatcgtcgcggaaatattcagagaacgaatagaccaggtgcgggagcaacttcctcttttgcagcaacgacgatttgcgccaccgcaattattatgatgtttttttacgcaaagcttgattcaccttgttacagattgctattgtgtgcgcgcgtcgaaagaccgttaatattctcaggttaatccggcgcgttacgcagcctgtttttagtgaagaaggtatctatgggtgagattagtattaccaaactgctggtggttgccgcactggttgttctgctgtttggtaccaagaagttacgtacgctgggcggagacctgggcacggcgattaaaggattcaagaaagcaatgaacgatgaagacgcgggcgttaagaaagacgtcgacggtagcgttcaggctgaaaaactctcgcacaaagagtaattgcgcgatgcgcttgctccgcagagtaaaaaaaccggcgagttgccggttttttttgcctgaaatgtaagcgtctattacacgatcatttcacttccatgcctttggcctggagatcagcatggtacgaagaacgtacaaaggggccacaggcggcatgggtaaagcccatcgccagggcttccgctttcatctcgtcaaactcttccgggctgacataacgctgtaccggcaggtgatggcggcttggctgtagatactgaccaagcgtcagcatggtaacgccgtgacggcgtaagtcgcgcataacctcaatgatttccgcattggtttcgcctaagcccaccatcagacccgattttgtcggaatttccgggtgcgcttctttgaagcgttccagtaatttcagcgaccagttgtaatcggcgcccggacgaacctggcggtaaatacgcggcacgttttccaggttgtggttaaacacatccggcggcgtcgcgttaaggatatccagcgcgcgatccatacgtccacggaagtctggcaccagggtctctatttttatctccgggcttttggcacggatggcggtgatgcagtcagcaaaatgctgggcgccgccgtcacgcagatcgtcacggtcgacagaggtgatgaccacatagcgtagcgccatgtcggcgatcgtttgcgccagtttctgcggctcttccgcatccggcgcaacggggcggccatgggcgacatcacagaacggacagcggcgagtgcaaatggccccaaggatcataaacgtagcggtaccgtggttgaaacattcagccaggtttgggcaagatgcttcctcgcagacagaatgcaggccatttttgcgcattgcggctttgatgccctggatacgggtagaatccgccggaagttttattttcatccattccggtttacgtagtagagcgtcgcgctctgtgaccacatttttaaccgggataagagccatcttatcggcatcgcggtattttacaccgcgttccatcacaatgggtttactcatagcgtgcgtgttccagttgcgaataacgaaggaaagcgtttcaattcaagggaaagttgtatttatcaactatttttgaatttgtgacacgcagtatatcattgataagggccataaagcagcctgacagcccggcaaaatgtaaaatagttgttgttttgtgctgtttgcccatatcttccgtgacctgaatgcaacatttttgtcagaacgcctcacggatgatatcaatgacgttctccagcaccggatcgcgcagactcagtttattgtaatgcagcgagaactcgacctgttcactattcaccggcgcgtagggaaggcgctcaagcggccagcagcggctaaataagtcgtagaagcgggtgggcatcagtcccagcagatcgctgctggcgatcagcgaggcaatggtaaaaatattgtagctgctaaaactgatttgctgatcgggaaatgtctcctgcagtcgctggcgcagcagggaaagatgttgtccctccagcatcagaaaggtgtgatccgcgctgttcagtctctcttcagtaatggcgttcgccagacacgggtgatgctggcggcagacaatctcaagcgtatcgctaaacaggacgtgatgctggatgctccggttgttatagctatgggtattgataatgagatcggtctgaaactgactaagctggctttcggcatcgtctaccggaatgttgcgcagcaaaagctgaggataacgcggcctgatggcctggtaaataatcggcatcactagcgcgccgaccgaaggcgtcgtgccaattgtaatggtgcgttgcttatcatagctgcccgtaagatccagggcgccaagaatagattccagcccctggctgatgtattcgtgcagatgcgtagcatacgtcgtgggcgttacgccctggcctttgcgaataaacagcggatcgggaaatatagtccgtaatttttgaatggactggctaatggctgacggcgtcaggttaagaattttcgctgcattgacgatccctttatggacatatacggcctcgaaaatcgtcaacagattgaggtcaatatttctcagtgttctgaaaatttgcggtttgtcctgtaggtgttgatcggccggttgtctttctgcctgattattatcactcacgctctggctccgaattcattcgtattatgaataatagatgaaatagtatattttgcatttatgggttggttttaaaattactcttatgaatgtatttttagtcatttcaataagataagtaacagcaaggccgggattttgttcacggaaaattcctcatcatgaggactgaagaggccatgccgcctggcggctacagcagggatataacgaaaatatagaaagcggggggagaagtaaagcattcaaatcatatatgattaatgacccataaatttcttgggccattatattttacgcattaagcagcaatatattcatacggtggattatttagcagagctaaaatattcgccagcaagcggggcgcaatattatccgtggtagcatcttccttccactgcgttattttggccatttccatgccggcataaccacacgggttgatacgcaggaaaggagaaagatccatgttaacgtttagcgctaaaccgtggaatgagcagccgcgacggatacgtaaacccagcgagcagattttcttttcacccacgtagacgcccggcgcatcggcgcgcggatgcgcctcaataccaatttcagccagcgtattcaccacggtctgttcaagtagggtgactaaatcacgcacgcccagtttacgtcgtttcaggttaagtaaaacgtacattacctgttggcccggaccatgataggtcacctgtcctccacgatcgctctgcacaacgggaatatcgccaggcatcaatatatgttccgctttaccggcctggccctgggtaaacaccgggtaatgctcaaccaaccagatttcatcatggctgttttcatcgcgcatatcggtaaagttatgcatggcctgagagatagcttcatagggctgaaggccgagctggcggacaaggattttatcctgatacaaaacggcatctccgtagagaatgaaaaaagagaggaaagtatatcacagcgggggaggcggggagttacccggataagaccgggtaaccgtctggatgtattacaataccattcgcacgatatcaatattgcccagttcttcgtacagcgtttcaacctgttcaatatgggtggcattaatggtgatagagaccgagtggtagttgcctttgctgctcggttttaccgtcggagagtaatcaccaggcgcatggcgctgtaccacttcaaccacctgatcaaccagctcaggtaacgcctgccccattactttgtaagtaaatggcgtagggaattcaagcagttcgttaagtttggttttcatgtcagctccggcattacgtaaaaaaaataacaactcccgccacagggcgggagttttactgatgcatagtatatggggacgaaaatcacactttcaagcgttcaatttttatccaaaccagtgatggaacattaatttaatgtaatcaatgattttaccgaagaagttcccttccgggatctcttgcagtacgaccagcggacgctgctcgatggttttaccgtccagctggaagttgatggtgccgaccacctggtttttctgcagcggcgcgtgcagttctgcggtattcagtacatagctcgctttcaaatctttcatgcgaccgcgagggatcgtcaggtaaacgtctttatcgacgcccagcgaggcgcgatcggtattaccaaaccaggcgggttcagaggcgaactctttaccagccttcagcggattaacggtttcaaagaaacggaagccccacgtcagcagttttttgctttctgtttcacggcctttataggtccgtccgcccatcacggcggaaatcaatcgcatctggccttcggttgcggaagcgaccagattatagcccgctttgctggtatggccggttttgatgccgtccacattcaggctgttatcccacagcagaccgttacggtttaactggcgaatgccgttaaaggtgaactctttttctttataaacggcatattcgttcggcacatcgcgaattaacgcctgaccaatcagcgccatatcgcgagctgaactgtattgtccgtcggcgtccaggccgtgtacggtctggaagtgggtatttttcagccccaacgcgttcacatagctgttcatcagcccgacgaaagcatcctggctaccggcggcgaaatcagccatcgccacacaggcgtcattgccggattgcagattgatgccgcgtatcaactgagagaccggtacctgcattcccggcttgaggaacatcagcgaggagcctttaaataccggattgccggtggcccaggcgtcattaccgacggtaaccaggtcggtttctttaaatttacccgctttcattgcctgtccgatgacgtaactggtcatcatcttcgtcagactagccgggtcgcgacgttcgtcggcgttttgttccgccagaactttgccggagttgtagtcgatcaggatgtaggattccgcatcgatctgcggaacgcccgggatcatagttttgatattcaggtcatcggcatgtgcggttgagataaacgcggcacaaagcgccgtggtgagcgccatgcgctgcataaaacgagcggaaaaagtggtcttcatggtctgaactacgacgtccgtgatgaaattaaaaaaagagccctactatagcaaaagcataactggcaggcatctgactttccgcgtgactttgttaatgtcatttacagaaattgacagtacagatacctgcgatcggttactgcgcgctggcgataaaggactgtaattgtgcttctgtttgcaaacgttgctgtaacgcgctggcttcggctttactggcaaaaggccccagttgaatacgccagaccgcgccgttttgtattacgcgtcctggtacgctgaactgctggcttaaacgctgttggtattgctgcgcacgcgtttgatcgctgacggcgccgacctggacgacgaaacgaccgctcgccgcggcggctggcgcactcaccggggcagataccggggccgcggcagcaggcgcgcttaccggcgtcgcagtcgctggagccgtcgctggagccgccaccggcgcggaaaccggcgctggctgtggcgccggcgtcggttcattactctccagcacgccaggcgccagcgtagtcggcgcgccgaggaagccgctgctgctcaccggcgcaccggtggtatcgtcacttttcaacgtggaattactgaccggaagaacgtcgccttgcggttgtgcaggtgctgaagaggcgcttcccattccgccgcttaaatcagggcgcgggggcagagcgtaggtctgtttcgccaccgtcgtacaggccatccccgggccggagagcgaaccatccggcgccacgataatggggtcaatccgtactttagtattattcgaggtattcagacgatccgccgctgcgcgggacagggagatgacccgatcggtgccataggggccgcgatcgttaatacgcacgacgatcatgcgaccgttggccaggttggtgattcgcgcatagctggggataggcagtgtcggatgggcggcggtaagctgcatcggatcgaacatctccccggaggcggttaaattactgccgggttccgcatcataaatagcggccaggccagcctggctaaagcgggacgggtcctgaacgattttataacttttaccgtcacgctgataatcctggtttgcggtcggattcagaggttcataacgcggttccgctccgctgatttccacagtcggaccattacataccgcaggttgcggcgcgacggtggtttgctgctgaccgccgtcattagtacatgccgcgagtagtactatccctgccgcgacgcagattacaggcaactgcttacgcattgcgcaccccttatacgcttttcgacaacatttttctgtgggtgtggatcgacatcacaatcccgaacccggccatcagcacaatcagtgcggagcccccgtagctgaccaggggtaaaggtactccaaccacaggcagaataccgctcaccataccaatatttacgaagacataaacgaataatattaacattaatccgccagccatcacgcgaccaaatgtagtttgcgctctggcggcaatccacaagccgcgcattattagcaaaatatagagcgcgagcagaatcaggatgcccaccagaccgagctcttccgccagtaccgcgaagataaagtcggtatggcgttcgggtaaaaactccagctgcgactgggtgccgtggagccagcctttaccgcgcaggccgcctgagccaatggcgattttagactgaataatatgatagcccgcgcccagcggatcggtctccggatcaaggagcatcatgacgcgctggcgttggtaatcgtgcatcaggaaaaaccacaaaataggaataaatgcagcgatcaatacaatggcgaccccaattaagcgccagctcagaccagacaaaaataggacaaagagaccggaaagggcgaccagaatagacgtccccaggtccggctgggcggcgaccagcagggtaggcataaagattaataccagggcgatggcggtatttttcagcgagggcgggcagacgtcgcggttaataaagcgggcgaccatcagcggcacggcgattttggctatttccgaaggctgaaagcgaacgattcccagatcgagccagcgctgcgcgcctttggatattgcgccgaaggcatcaacggcgaccagcaaaatgatacaaatgatatagagatagggcgcccagccttcatacacgcgcggcgggatctgcgccatcaccaccatgaccaccagccccatcgcaatctgaccgattttacgctccatcatgccgatgtcctggccgctggcgctccagatgaccaacgcgctataaaccagtaacgccagcagaatgagtagcatcgtgggatcgatatgaattttatcccagaaggtttttttgttcggattatccgtcatgattattggtcctccgccgctgcaaccaccgggttttccgcaggcaaatgggtgttgttgtcgcccagcatgatgtgatcaaggatttggcgcatgatcgtgcctactgccgggcctgcgccgccgttttcaaggatgatcgcgacggcgacctgaggattgttatacggcgcaaaggcggtcatcaatttatggtcgcgcaggcgctcggcgattttatgcgcattgtacgtttcgttggccttcaggccaaagacctgcgcggtgcccgacttcgccgcgattttatagggcgcgctggcaaaatatttatgcgccgtgccgttagggcggttggcgacgccatacatgccatctttcgcaatttcccagtagccggagtgaatatcgcccaccggcggctcatgcggctgtacccacggcacctgtttaccgttttccgcggtgctcattaacaggtgcgggactttaactacaccgtcgttaataaggatcattagcgccttactcatctgaatcggcgtcgctgtccagtaaccctggccgatgcccaccggaatcgtatcgccctgataccacggttttttaaagcgtttctgtttccactcgcgggtcggcatattaccagagcgctcttctgcgagatcaattccggtgtagtgaccatagccgaacttacccatccattctgacaggcgatcgatccccatatcataggcaacctgatagaagaaggtatccgccgactcttcaagggatttggtgatattcagatgcccgtggccccattttttccagtcgcggtagcgtttctcagaccccggcaactgccaccagccagggtcgaaaagactggtgttacgggtgatgacgccagcgcttaacgccgatacggcgacgtaaggcttaacggtagaagcaggtgggtagacaccctgagtcgcgcggttcactaatggcgtgttcgggtcgttaagcagcccggaataatctttgctggagatgccatccacgaaaaggttagggtcgtaacttggcatggagaccagcgatagcacgccgccggtacgtggatcggtgacaatcaccgccgcgcgactgcctgccagcagcgtttcaatatactgctggagcttgagatccagcgtcaggtagatatcgtgtccggcctgcggcggcacctctttgagttggcgaataacgcgaccgcggttgttgacttcaacctcttcataaccggtttgcccatgcagaatatcttcatagtagcgctcaatgcccagcttgccgatgtcatgggtggcggcgtagttcgccagtttgttttctctgtcgagacgctcgacgtctttatcattgattttcgatacgtagccgataacgtgggtcagcgccgatccgtatggataatagcggcgtttatagcctttgacttcgacgcccggaaaacggtactggttgacagcaaagcgcgcgacctgaacttccgtcaggtttgttttcaccggaatagaagtaaagcgatgggatcgggcgcgctcttttttaaaggcggcgatatcgtcgtcgtttaaatcgaccacactgcgtagcgcatccagcgtttgctgaacgttatccaccttttccggcatcatttcaatctgatagatagtgcggttcagcgcaaggggaatgccgttacggtcgtagattatcccgcggcttggcgcaattggcaccagcttgatacggttttcgttcgagcgggtctggtaatcggtaaaacgaaggatttgcagattatacaaattggcgatcagtacgccggtcagcagcaaaatacccaaaaaggcgaccagcgcccgacgcacaaacagtgcggactcagccgtatagtcacgaaaagaattttgtcgtttcatccgctgcttaatcttctcaagacttcacgatcactcacggtgataagggtggttggttgtgatgctccacgcccggtacaaactctccgcaaccagaacccgaaccagcgggtgagggagcgttaacgccgagagcgaccagctctgttccgctgccgctttgcaggcgggagataatccttccgggccgccaatcagcaaactgacgtcgcgcccgtcctgtttccagcgctccagctcattggctaactgcggcgtatcccacggcttgcctggaatatccagggtaacaatgcgattcttaccggcggcggccagcatctgctcgccctctttgtcgagaatgcgtttgatatccgcgttcttgccgcgtttgcccgcagggatttcgatcagctcaaagggcatatctttcggaaaacgacgcagatattccgtaaatcccgtttgaacccagtcgggcatcttcgtgccgacagcgacaagttgcagcttcacgcattaactccagagtttttccagttcatacaggcggcgactttcttcctgcatgacatgcacaatcacatcgcccagatcgacgacaatccagtcagccgcattttcgccttcgacgcccaatggcagcataccggccgcgcgcgacgactgcaccacgtggtcggcaatagacataacgtgacggctggaggtgccggtacaaataatcatacagtcggtgatactggatttaccctgaacatctaaggcgatgatgtcctgacctttcaggtcatcaattttgtcgataacaaaatcctggagtgctttaccctgcaagttttccccctgggtgaataattgcgttataacgatagaaaaaaggccaacaggctggaccggtaaggcgttgcgagttaacgctaaccttccggcgggacgccgtgtagtatacctgaatcagcggcgataccgggacttatgtcgccggatcggcgtttaaaaccagattatcatcccatcccacgtcacagaaagcatcgccatttttgtaaaacaatttctgcaaagctctgcaaggtgaaaaaagcctggctgcggagaataacagcctgtcgggggctgtcaatgggcgaaaccgctgcggcgagaaaaaacggaaaattcatcactcaggccgccagacggcacgactatttaatactttcagggtggcgaacccttcgcatatgtcgattgcgctccagcatccctgttctacccggaaatgccatagcgaggcggcgggcattgtgagcagacgggcaatcaacaggctgagtacgccctgatggctgacgatcagcaggttctggcaatcgctaaacgcgtcgagtcgcgagataaagcgctctacgcgccgggtaaaagcctgaaaaccctcgccattggtcggaaccgcattctgccagtccgtacaccaggcggcatagctttcggcatcttcatgggtgaggtcgcggtgatggcgcatttcccagtcgccaaagtacatctcattaagctcaggtaagatgtgttgcggcacatcccggccctccagtacgagccgggcggtatggcgcgcgcgctccagctcgctgcataacacccggtcaaatggcgcgtggcgcaataaagtatgtagcgttttcgcctggccaatccctttttccgttaacggcgtgggagcatgtccgctatacaacccggcgacattggcctcggtttcgccatgacgcaccagccacaatcgcatggtattcctcatgaggttaaatgcgcaaaacatgataatgcccctgattgcgcaacgtttttttcactaaaatagcgttttttggctggaggcataatggcgttattcaacagcgcgcatggcggtaatattcgggaagccgcgacggtgttgggcatctcgcctgaccagttactggattttagcgcaaacattaatccgctgggtatgcctgtcagcgtgaaacgcgcgcttatcgacaatctggactgcattgagcgctacccggacgccgattattttcatttgcaccaggcgctggcgcgtcatcatcaggtgccggcatcgtggatactggcgggaaatggcgagacggagtcaatctttaccgtggcgagcggtcttaaaccgcgtcgtgcaatgattgtcacgccaggtttcgcggagtatggccgggcgctggcgcaaagtggctgtgaaattcgtcgctggtctctacgcgaagcggatggctggcagcttaccgatgccattcttgaggcgttgacgcccgatctggactgcctgtttctgtgtacgcctaataatcctaccggcctgctgccggagcggccgttattacaggccattgccgatcgctgcaaatcgctgaacattaacctgatcctggatgaagcgtttatcgattttattccgcatgagacgggctttattcctgctcttaaagataatccgcatatctgggtgctgcgttcgctgaccaaattttatgccattcccggcctgcggttgggatatctcgtcaatagcgatgacgcggcgatggcgcggatgcgtcgccaacaaatgccgtggtcggttaacgcgctggcggcgcttgccggtgaggtagcgttacaggatagcgcctggcaacaggcgacctggcattggttacgggaggagggcgcccggttttatcaggcgctttgtcagctccccctgctgacggtttatcccgggcgggcaaactatctgttgttacgctgtgagcgagaggatattgatctgcagcgacggttgctgacgcagcggattttaatccgtagctgcgctaactacccggggctggacagccgctattatcgtgtggcgatacgcagcgctgcgcaaaacgagcgtctgctggcggcgctgcgcaatgtgcttaccggtatagcccctgctgattgatgtagttcagcacgttttccggcaacagatcgtcgcaggattcgcctttttccagccgttcgcggatgagggttgcggagatattaagccagggcgtttccgccaggtaaattttaccggctggcaactggtgcagatcgtccggcgtatgggtcagatgctgttccagccactgctggtgttgcgcctgcgtcatttcaagggggtagccgggacgacgacaaacgatcaggtgagtgttatcaaggatggtgtcgtaatcatgccaggtggggaagttaagcagcgagtcctggccgataataaacgccagcggcgcttcggggccctgttcttcgcgccatgctttcagcgtttgcgcagtgtaagagggcgcgtttcgctgtagctcgcgttcatccagcgtaaaaagcggcttatcggcgatagccagctccagcatatatttacgctgcgcgctggaggcttccggctgggggcgatgcggcggcacattgttaggcataataatcacccgcgataagccgatcagattcgccagcgtttcaacaggtttaagatgtccataatgcaccggatcaaaggtgccgccgaataaagcctgtaacgatttcatatcacccatcaataaatacgtctgccagcgccttatggcagagcaggagcgacagcccttcaagatctgcccataccgactgaccataatcctgtttgagcgtaatttctgtacgcgtcagtaactgcacggcctggcgaagctgcgcaggatggagacgctgcaacgcgtcgccgatcatggggcgacggttttgccagacccggtgtttatcaaacagcgcgcgtaacggcgtatgcgcggactgacgtttgagatttaccagtagcagcagctctcgctggagggtgcgcagcagaataaccggttcgctgccttcaaggcgtagctgttgcagaatgtgcagcgcgcgtttgcttttccccatcagtaacgcatccacccagtggaaaggggtaaagtgggcggcgtcattgacggcctgctccacgcgaggaagcgttaacttaccgtcaggccaaagcagcgacagtcgttccagcgcctgcgccagcgccaacagattgccctcatagcaatagcacagcagttggttcgcggcgtcatccagttgcaaattctgtgctttcgctctggcggccacccagcggggaagctgcgcctgctccggcgtctgacaactgacctgaacgctacggtctgccagcgcggtataccaggcggcgttttcctgcgctttggtgagcttgtttccgcgtactattaataacaggtcgtcatgcagcagctcgctcagggtggcgagttgctcattcattgccgcgttaggcccgttttccggcagttgcagcaccagcgtttgacggctggcgaacagactcatcgcctggcagagtgagaaaagcgatccccagtcggtactgggatcgagagtaaaagcgtggtgctcttcgaagccttgcgacgcagccgccagacgaatagcgtcctgactttcctgcagcagcagcggatcgttgcccaatagcagatatgccgcacgcagcccttcattgagctgcgcgcggagttgttcaggatacaacctgatcattagttactcagcgtagtggagacgcgtgctggcgtagaggcgggcgccgccgtctcattgtcggcggtagcctcctctttcgtcgcctgaatatccgccgcgcggacgctggtcagcttacgaatcagctgttcagcggctttgtcgtacatctcctgaacgatcatggcctgctcgttatccttcgccaacgccatctgcgggttatcgaagaacgaacggtacactttcgtgctgataggatagatgtcatggcccggaatcaataccgaggcattgacggtcatcaccatctgatattccgccgtctggccgtcctggaacactgacgccgtatcctgcaaaatagtcaccgttccaagccgcagagacggaacgtctttgcgcgttgtgtctttatcaagcaggtttacgttattcagccgtaactgattacgtaccgcacgacttagcggaccgttcggatcgccggaatcgaggatcatcgttttcattgaagccggaacctgcgtagtgctacgcagatgccagccgcatccggcggtgaccagcaccgccagagataacaacagtgttaccagatatcgcacgcttcctcccgcgcttagccaacaaccagattgaggagtttacccggaacgtaaatcactttacgcacggtaacgccatcaagatattttgccaccagatgttcctggcctgcacgttcacgcacctgttcttcggtagcatccaccggtacggtgattttcccgcgaactttaccgttaacctgcacgacaaccagcgtggtgttttccaccattgcctgctcgtcggctaccggccacggcgcgttgtcgatatcaccttcgccgcccagctcctgccacaaggtaaagcagacgtgcggcgtgaacgggttaagcatacgcacgacggcctgcagcgcttcctgaagcagtgcgcggtcttgttcgccttcctgcggggctttcgccagtttgttcatcaactccatgatcgccgcaatggcggtgttgaacgtctgacggcggccgatatcatcggtcactttggcaatggttttatgcacatcgcgacgcagcgctttttgatcttcgctcagcgcatcgacgttcagcgccgcgacaggacctttagcggtgtgttcgtaaaccagcttccagacgcgtttaataaagcggtttgcgccttctacgccggactcctgccattccagagtcatatccgccggagaagcgaacatcataaacaggcgtaccgtgtccgcgccataacgttcaaccattacctgcgggtcgataccgttatttttcgacttggacattttactcatgccagtgtagaccagctcatgacccgctgcgtcttttgctttgacaatgcggcctttttcatcgcgctcgacgatagcgtcaactggcgaaacccagttacgttcgccgttctcgccgacataatagaacgcatccgccagtaccatgccctggcacagcaactgtttagccggctcgtcagaggtgaccatgcccgcatcgcgcatcagcttatggaagaagcggaagtagagcaggtgcatgatggcatgttcaataccgccgatgtagatgtcgaccggcagccagtagtttgccgctttcgaatccagcattccttcctgatactgcgggcaggtgtaacgcgcgtagtaccatgacgattccataaaggtgtcgaaggtgtcggtttcacgcagcgccggcataccgttaacggtggttttcgcccactcaggatcggctttaatcgggctggtgatgccgtccatgacgacatcttccggcagaataaccggcagttgatcttccggcgtcggcagcacggtgccgtcttccagggtgaccatcgggatcggcgcgccccagtaacgctgacgggaaacgccccagtcacgcagacgatagttcactttacgttcgccgacgcctttttccgccagtttatcggcaatggcgttaaacgccgcttcaaaggccaggccgtcgaactcgccggagttaaacagcacgcctttttcggtcagcgcctgttcggaaagatccggctcggaaccgtcggcggccagaatcaccggcttgatggtcaaaccgtatttggaggcaaattcgtagtcgcgctgatcgtgacccggaacggccatcaccgcgccagtgccgtactccatcaggacaaagtttgccgcccagaccgggatctcttcgccagttaacggatgaatcgctttatagccggtgtcgacgccttttttctccatggtcgccatttcggcttcggccactttggtgttacggcattcgtcgatgaacgccgccagttcggcgttgttcgccgccgctttttgcgccagcggatgaccggcggccaccgccaggtaagtggcgcccataaaggtatctggacgggtggtatagacggtcagggtgttatcgtaacccttcacatcgaaggtgatttccacgccttcagagcggccaatccagttgcgctgcatcgtttttacggtatcaggccagtggtccagcttatccagatcgcgcaacagctcgtctgcgtaagcggtgattttgataaaccactgtgggatctctttacgctcaactttggtgtcgcagcgccagcagcagccgtcgatcacctgttcgttggcgagaacggtctgatcgttcgggcaccagttaacggcagaagtcttcttgtacaccaggccttttttatacagctcggtgaagaacttctgttcccaacggtagtattccggggtgcaggtcgcgatttcacggctccagtcatagccaaaacccagcgtttttagctggtttttcatatacgcgatgttgtcgtacgtccacggcgccggcgcggtgttgttcttcaccgccgcgccttccgccggcaggccgaaggcgtcccagccgattggctgcagcacgtttttgcccagcatacgctggtagcgggcaaccacgtcgccgatggtgtagttacgtacgtggcccatgtgtagtcggccagaaggatagggaagcatcgacaggcagtaatacttctctttgctctcgtcttcggtcacttcaaatgtgcgcttctcatcccagtgaagctgtactttggattctatctcttccgggcggtattgctcttgcatggcagccagtagtcctgttttcgatacagctacaaatgtagctttagaggtggtgtttagatccgcatagcatagcccaaacacgcacgtcaaaacagggggtagaacatttgtcgcgccaggcgtccgtgaggaggtgacgcaaaatgcgacacgactgaggcaaattaccgcagttcctgtcaccgccagatcggcccataaaaataaagtcatataaaccatgtagttaaaaaatggcacgccttttgattagggaagacaggactaaagcaaaggagttaatcgtgaaaaaaaatgcagtggtgattcaccctcaggattgcgtcgcgacggctattacggcgctcaaggctggcgaaaccgccacaatgttcattggcgaacgcgagataagcgttgtgttacatcaggatgtgccatttggccacaaattcgccatctgcgatgtgccttttcatggcgaagtttataaatatggcgaatccattggccgcgccactcaggaaataaaaagtggcgactatgtgcacgtccacaatgtggaaagtgaacgcggacgtggtgactggaaataatataaaacaagggaaaatgattatgagcaatgagacttttttgggtttccgccgccctgacggccgttttggcatccgtaattatgtactgattttacctaccagcgtttgtgcgaataaagtcgcccaggatattgcccggcaggtaaaaggcgcgacatgggtgaataacgattttggctgctgccaggtggcaggagatgcgcgtctgacggaaaagacattgattaatgtggcgaataatcccaacgtcggcgctattgtggttgtgggcttaggctgtgaaggcgcggagccgctgcgcatcgcagaagagattaccgcatttggcaaaccgacctcctgcattaccattcaggaagagggcggcacgcttaaatgtcaggctcgggggatttcgctggcccgcgattatgcgcaacaactctccatgcaaaaaccgcagcaagcaccggttagcgagctgctgctggcgatggagtgcggcgggtcagatacgacatcggggctggcgtctaacccttcctgcggggtcgcctcggataagctgatacgctgcggcggaagctcaattctttctgaaacgacggaatttattggcgccgagcatgtgatggcgaaacgcgcggtgacgccggaggttggtcaacagcttattgatttagtggtcggctgcgaggcgcgagcaaaagcgctgggcgaggatattcgcgggggacagccgacgccgggcaatattaaaggcgggttgactaccattgaagaaaaatcgttaggctgtatgcataaagcgggtcatgcgccgttacagggcgtactggaatatgccgatagcccaacgcatccgggcctgtggattatggataccccggggcaggatattgaatctatttccggcatggtggcggggggagcgcagatcgttatttttactaccggtcgcggaacgcctgccggtaacccaatagcgccggtaataaaaattacgggtaataaagcaacgtgggaaatgatgcaggacaatattgatattgatgtgtccgccattatgtctggcgaggcttctattacgcaaatgggcgaggaaatttatcaggaaattttacgcgtcgcgaatgggaaaacgactaaatcagaagatttaggtcataacgaattctctatttataagatcgcgccgacgttctgataccaaatcgggcagcacaagctgtccggttatctcctgggaataagctatgaaaattaaaaaaacactggaacgttttcctggtggtatgatggttgtaccgctaatcatcggcgcattgtttaaaacttttgcgccggaggcgctggaaataggcggttttgtcacttctatttcgcatggcgcaatggcgattttaggcatgtttttagtctgtatgggcgcggatatccagtttaaagccgcgccgaaagcgctgaaaaaaggcgctgcgatcacctttgcgaaatttgccagcggcgtgattattggcattctggtcggaaaattttgcggcccggatgggttattaggtctgtcggctttagcgattatttcggcgatgaccaactcgaacagtgggttatatgccgcgttggtgggggagtacggcgatgaaaccgacggcggcgcgattgcggtaatatcgttgaacgatggtccctttttcaccatgctggcgttaggatcggcaggcatggtgtcgataccctttatgaatctggtggcggttattattcccattatcattggcatgattttgggtaatctggatgaggacatgcgcaagtttcttaaacagggcagcgtggtaacgattcccttttttgcctttgggttaggatacggtattgatttcgcaagacttatcacggcaggttcttcaggcattttactgggactcatgacggtggcgattggcggattttttaatattttcgccgatcgtctgacgggaggcagcggcgtggcaggcgcggcggtctccaccacctctggcaacgccgtcgcgacgccagcggcaatcgcgctgctcgatccgcattttaccgacctggcgtcgacggcggcggcgcaggtggcggcctcgacgattattaccgctctgtgcgcccccttcctgaccgtatggataaaaaaacgctacgatcgtaaactgaacccagccgccgcaggcggttagcgtttcggcggaaaataaatcacgacgggcggtctcgcccgttcataaaccaacaggatggtgagtgatgaataagacgaaagatatagccgcatctcctctctgttttgtctctccttaccctcaactggcaaaggctgccgaggcgctggtcgcgcagttggattacgccgtcactattcatcaaacgacgcttaatcgtatcctggatgagctacctttattagagtcccgtgggcaccaggtactgattagtcgtggcggatgtgcggaaatattaaaaaagcacagtaaattaccggtagtcgaaattaaaatgtccggctacgacattcttgatgcgcttatcccttttaaaggacaaaaaggcactgtcggtattgtcggcttttccagtgtgatcaaaggatgcgcgcgcgtagcggaacagttaaatattaactataaaatttttaccttacagggaaatgataaagaaacgatttcttgcctgaagcggcaattagcgtccacgccattagattgcattgttggcgataccgtttgtcaggattatttttcaccgctgggctcgcaattccgtttacttgattccagccccgcctcaataaccgaagctctggaagaagcccgctcattatatctggcttttcgcagccaattactcgagcgtcatcatctgcagctgattctcgatcagtttgataaagctgttatcacgcttgatgataccggcgcgttactgcattacaataaatatgcgagccaactttttaaaattaacgcctccggtgagatttatgacgcatctttcctgaaacaggtattgcaccaggagcggcatacattacgtgagggaaaaaccgtcagcgcgaaagtcgtcgatacgccgcaaggcgcgatggtagttaatctgtatccggtatttgcggccagacagttaagccgggtagtgttgacgatgcaaaccgtctccagtttacagggggcggaacatcatgttcgccgccaggaactgtctcgccgcggcttgagcgcccgctatcatttcgacgatctgcttaccgaaaacccggaaatgctgcgtcgtctggcgatcattaaaaattatgccggtacggacgcgactatcttaattaatggcgaaagcgggacgggaaaagaggtgctggcgcaaagtattcataatgccagccaacgcgtcaacggcccgtttgtcgccattaactgcggcgcgatggcccctcagattctggagagcgaactctttggctatgtcgccggcgcatttaccggcgcgtcgccgaaaggcaaaataggcctgtttgaattagcgcaccacggtaccatttttctggatgagattagcgagctggataaaccgctacagacgcgcttattacgggtattgcaggagcggcagattatgcggctgggctcagaccagatgatacctgttgatattcgcgtgattgcggcgaccaatcagacgttaacgaagctcattgcggacgggacatttcgcgaagatctttactatcggcttaacgtattaaaagtgaccaccatcccgctacgcaaacgtccggaggatatcaaagccatcggcctgtcgctgcttactagtttcagccagcattataaacgcccggcactaacgttaaccccggcgctgtggcaagagcttcagcgcttcgcctggcccggaaacgtcaggcagttaagcaatattatcgaacggctggtactctctattgatcactccccggcaacgctggatgagggtcgcctcttgctggacgatctggaagaggggagccgacgcgagccaactacctgccacgactgccagatgctggctggcgattataaaacgattcgcctgcgtattttgagaaaattattagaggcggaaagggataataaatcgttagtggcgaaacggttaaatgtcgatcgtacctcgctgacgcgctggatacgcgagtcggcctgacaagaatttacagactctgtgggcagccttgcaaagcgtaacgcaaataacgtctattattataggcagttaacgatccaagaggtgaagtgatgaacaaggttgctcaatattaccgtgaactggtggcctcattaagcgagcgtttacgcaatggcgagcgcgacattgatgcgctggtggagcaggcgcgccagcgcgtgatgcaaacaggggagttaacgcggaccgaggtggacgaactgacgcgcgctgtcagacgcgatctggaagagttcgccatgagctacgaagagagccaggacgatagcgtcttcttacgggtgattaaagagagtctctggcaggaattggcggacattaccgacaaaacccagctggaatggcgtgaagtcttccaggatttgaatcaccacggcgtgtatcacagtggcgaagtggtgggattggggaatctggtgtgcgagaaatgccactatcatctggcggtttacacgccggatgtgttgccgctctgcccgaagtgtggccacgatcagttccagcgcaggccgtttgagccgtaaggttcattatcgtgagcggacggttgccgtccgccatgttaagcgtgcagttgggcttccagtttgcggatctcttcatcgacgttccatttgcccgtgggctgtgcttttttgaaccagtagagcgcttgttgtaggtcttgtgcggtaccgtgtccatctctgtacatgcatccgaggttgtaccagcccgatgaattgttacattctgctgatttgtggaaccattccagtgctagcgaataattttgctcgacgccatgaccgcatttgtacatccagccgatactgttataggcatcatcgtcaccctggtctgccgcttttcgaaaccagtatattgcctgctggtaatcttgtttgataccttttccgatgtaataacaatagcccatctgatattgcgagtagctgctctcttgtagcgcgctcttcttgtaccaaagggcggcaagggataaatttttccgacatcctttcccattgccatacatatacgccagtctttcctggctggcgcaatggccttgtaatgctgcctgtttaaaccagtagagtgcctgtgtatcattttgctctacgccagttcctgaatgatacattctcccgagattatattgcgcaaggttgtggctctgttctgctcctttgcgataccaggcaacggcctgggcataatctggcgccatcccggtttctccttcctgaacccagcctaatgtgttgaaagcgtggcggtgtccttgctgtgcggctttttctgaccagaataaagccagcgtattatctttcatgtcggtaggcgtgtctttgtatcgtaagccgagccaatattgtgcctcgcagtgtccttgttcagctgcctgctgcaaccaataaaaagagagcttatcctcttcgctgccatctatacgttcgtcattatataaacggcctaatatatattgagcttcactatttcctgactgcgccagttcggttaattgtgctaaagatacgttgtcgcagggatgactggttatggaatgattcattttttaatttatcccgccattgttttttagattaataatatattgcgatttggctttgttgtactctattttagttttcaattgcgtttttatttgtggtgtgaatatattttggcgatttattatggataaagaatcacaatatttactctttgcactttcctcgccgatggaagtattgaacgaggactgtttaccttcacattcgtcaccgaaaatgtatttaggtgtaaaacgtttcgatcttgaatcgtcgtggggtattgaaaatcgcgatgaactgcttcagaccatttcccgcaggacggatgacggtcatgccacacaactggaatggctatatcgccgctggtttaggtatgcgccgcaggagtggcaggagtataccgacgcgctggacgagggagatcgcatttatgcccgattcgtcgctgataccgccgtgtgttgcggcgaaggtggtattcgcagttgggattatgtgcggatgggatttctctgccgcatgggcgtgctcaatgaatggctgacggaagaggagagcctgtggctgcagtcgcggatacagcttcgcgcgctcagctattattccggctggttgccgtacttcagcgcttattacaccgggcgtttgtactggcagttacggaatggcgataacctaccgctgctacgcgagacattcgcccgtaaggagtttgatgacgcggggcgacgtatgatgaataaactgatcgccgggaaggacagtttttacgccacgctgccgtggcgctacctgccccattaccctgaatgcccggacacgcttcaggaggtgagcgatctatgaaaacctgttggcaagtccttggcattgaggccaccacggataccgacgccattcgtcaggcttatctggcgctgctgccgtcatttcatccggaaaccgatccgcagggttttaagcaattgcgagaagcctatgagaatgcattgcaggggacaacatcgcccgccattacggtggttgatgaggatcccgataccccgtgggtgaattatctcagggagatattcggtgatttgctggcggatggcgaacggcgctttcagccgcaggcatggcaggagtttatccaacagatcaataaattatcgatttcacaggtcgaaaaatcgcgctggtggctgtgcgctatcgcgatgaagacctttcctatttcgtactcgtgtctgaaactgctgtcagatcgcctggcctgggaacaggggagtgataatcgagatgtcgatgccgaggaggtggaggatcttttgtttgaaatccgccgtggcgacctgtttgattattcgctattgctgcatttgccagtggcggtacaaaaccagaccattgctttttatgatgccctggacaacacctttttcgagcatcctctctatttcgcccaacttatggcccagcacggcccgtggattatcccggacaatctacgctttcaacgacgtctgttacgctggttcagcaccttgcactggggtattgcggagctgctgcctgtcgcactggcatggcaggaagccgaacccgataacgcaacgccgggttattactacttagcccagcgcgtattttgcggtgaaggcgatagcctgctgccagaactttacgcgcagtggtgggcgcatccttctacccagcttgacgatctgttgctgcgctggtgccgtcagcatcgaccggactttttcccgctgctggtgatggcggttgaggggcgtgagcaggtggatattaacgctgaacagctgctgtatattcccggctcaagcgctcgttcctgcttgctgtgggccgaggcgctgcacagcggcgcattatcgccgctaagcgaaagttttattgcgcggcgtttgaattatggcgcgccagcggtgagtgaggcgcatagccagcatccatactggctgttgtatcaggtggcggatagcctggcgtgcgccgaggagccgtcagcggcattgttacagagtctggtaacgaagcttgatgcgccggatatctgcccgttggaagcgctggttattcgcgggttgctggggcgggctgcggctgtcgccacaccgtgtgaagctgtagtcgcagatgaagaaccggtgacgacggtgacttcgccgagtacggaggaatctggcggcggctttggcctctggcaggtgattaaaatcattttatttattggcgttgtcggccatgtattacgccagtttatgcattagggatatcgaatatggacaaggaagaacaatatttactttttgcgctctccacgccgatggaggtgctatatatcggcaatgagccttcgcatacctctccagcaatgtataccggaattcctgctgtcgatctctccgattcatgggggattgataaccgtgaagatcttattcaaaccatctatcggatgacggacgatggtcatgcggcagatttggctcccttttatatccgctggtttacgctatctcctcgtcaatggcgcgaatttaccgcgcagtttggcgagcagggccagatttatgcgcgatttgttgccgaaaccgcactatgctgcgggcgcggaggcattaaagcctgggactatgtgcgtatggggtttttatgccggatgggggtgttgaatcaatggctgacggaagaggaaagcctgtggctgcaatcgcgtatctatgcgcgggcgtactatttttacgacggttggacgcaatattttgccgcctattcgttgggtcggctgtactggcaggctaaaggggacaccatacaggcatatttcgctcacctaaagtacgacgcttcaggcgcgcggatgtttaatgaactggcctctacgacagagagttattatgcgcagctaccgtggcgtccgctcaacgaacaaccgacatgcccggaaacgcttaaaggagtgagcgatttatgaatatctgttgggaaatcctgggcattgaacctaccaccgatctggaatgtatccgtcaggcttatcttgccctgttgccctcattccaccctgagagcgatccgcagggttttaagcgattgcgccaggcctatgaagaagcgcagcactgggccgcctcgcctgcggaggacgcaaaaatggaagaggtgggcgacgaacatgaaatactggtggcgttcagggaattgctggcatcagagcgcgatcgctttcagccctcggcatggcagaaatttattcagcaattgaaccagtgttcaatggatgagatagataagctgcgctggcagttgtgcgacatcgccatgaaaacggaaacgatctcgctgtcttgcctggcattgttggcgcagcgtctgaactggcagccgcaggaagcagaagatgatgctgatggagaagagctggaagcatttctggagaccgtaaagcggggcgatgcgtttgatctgctaagtctggccaaattgcctcttgttgttcaagaccaaactgacgcctacttttttaagcttgagcatatctggcgcttttatcccgaacattttgccgacgctctacaggttcagggcgcctggataattcccgatgataaacagctgcatcgtaaactattacactggtttagcgccgagcagtggggcatggcggaactggtcgatattgctcgtcgctggcaggccgcggagccggataacgaagatgcgcactattacctgtgcaaacagcgtttgctctgcggtgaaggggaaagcctgttggccgacctttgcgatttctggcagcgttatccctccacgcaggcggacgacctgttgctgggctggtgccgccagcatcggcctgatttcttcccgctggcggtgatggcggtcgaagcgcgctgtatggcggatgccgaatatgtccccggtgaaagcgcgcgcacgcgtttactgtgggccgacattttgcacagcggtaggttatcaccgctggggcgttcatttgttgactccctgttttataagcgaaaagcgatggcgtgggcaaattcacggctgagtacccagggggaacccgaaacgccgctgttggatctgtaccggacggcggagcaggtggtgctggaagcgtttcccaaagaaaagcccttttttcgcctgctgatccggctggaggaggggcaatcctgtccgctggaggcgctgataacgcaggcattgtcatctaaaatcgccatgaagccaggcgatattcgtgacaaaaaggagctggcggaagagctcaggctggcggctgagaaagaagagacaaaattgtcttctgaagcgaaaaccgaagcaccccgtcaggcggaatctggcggggtgatgaaaatcatgaagattgtcggtttgatcgcgttgattgtctgcgcgttaaatcgattcttccattttttctgaacaggggtagtgaaagcgccgttacggcgctttcggctcgtcaatacccagatattcacaggcgcgacggcgtacgtcatcgacacgctgcatatcattagacagcagggccgcgtcgaaatcggtaataatctcccccagcatttcgcgctcatcgcctaacgcgcgtgaccactgctcctctaactgtgctttaaacgtccggttaatcagcatatcgcggggataaattttcagcgccagcagccgctcgcggctggcgtcgatttgctgcgtcgtcagtgaggtggcattgtgactgatgattctggattcactcttgccgtcttccagcagcacgtcaacttccagcagaccattaatatcgtagctaaaacgaatatcaatggcctgaatgtgcccgttcggcttcagcatgacgtcaaaagaatcaatcaggatattatttttcaccttatggctttcgccctggtataccctgacgcaaatagagtcctgctcagggtgcatggtggagtacgtttccacttttgacaccggaacggtggtattgcgttcaatgatgggcgagaaaataccaggcactccctgtcggttgacttccacgcccagcgagtaggggcagatatccgtgaggatcacctcttcaacgtcttcatggcgcaggcgacaggcggcctgagttgcggcgccaagcgccacgatggtgctgggatcgtaactttgatagggcaatttaccgaataagcgcaccgcgatgcgttgcaccagcggcatctgtgacgcgccgccgaccagcaccaggctgtcaatttgctccggtttgagtcgggagtcgcgcagcgcctgctcaatgggcgtgcgcagccggttgagcaacggtagccacagggcttccagctcatcgtcataaaacgtgctttccagaacgctctcctgataaagccagctcatgcgcagcggggagctgctggcgcattttgcggcttcaacacaggcatacagcgcagccagatcgctatccgtcagcgctgatttatcgaggttccagcgtttcagcacttcatcaagcaacaaatgcgtgaaatcttcgccgccgaggtagttatcgccagcggaggcgtgaacttcgataatcggcgtagcgtattccagaacggtcacatcaaaggttccgccccccagatcgaaaaccagcgaacggctattttgctgcgtatgcaggccataagccattgccgccgccgtgggttcattgatcaagcgcacggcgtttaaccccgcaagctcagcggcaaggcgtgtatgcttacgctgctcatcgctgaaataagccggaaccgagatcacgacatccttgattggctgctgaaggtagtcttccgcatcttctttcagcgagcgtaaaaccagcgaagataattccggcgcattaaacgactcttcacccaaatgccagtgagtattactgcccattgcgcgtttaaataaggcagcggttttatctggatgagatgttttacgggctgcggcaggttttcccaccagaatttgtttattttcatccatactaattatggatggtgttaaatattcaccaaatttattaggtattaattgtgcggctccgtcttgccagacggcgattaaactattagtggtgccgagatcgataccaatcgctaacgttgcattatccattgcgtttaatttatcgggaaagagagtttatagaataaagaacaccaccctctggcgtggtgatctttatcaatgtcacgcctggcgaaagtattcatccataatgttcgtcaactccgggcgctcgccgtcatcattgatggcgaaatcgaggaaaaaagcatcggcctgtggcgtgcgtttctgggccagtaaacgaaacgccagcgggtagtggcaagcataaccgggtgcgcgagtcagaaaacggacaaaatcaatcaacaagggagaatgggtataaaacagcgcgcgtaacagtacggcgggaaatccctcttcggtgatcccttgcgccatgattttgttgaggccggcttcgctcaaatcgcctgcggcaataatatctgcgcaggccgcaagatcgggataatgcgttgcgcagttagccaatgcgttcggccagttgacgcgggtataacgttcgtcatggcgagtaaagtaatcctcccaaagggatggcggtagtttttcgtactgtattttcagggggatgcggcgctgaaactgggcttcttccaggcgctcgccgtcataaaatcgcaggcattgctgtcgcgtctcgtagcatgtcatcgccaccggctggctgatgacccaggtcttcacgggccggccttccagcgcggcggcggtggctttatggtgaccatcaagcaggacgcaaagccagctgtcattcatataccaggccagcgcgtggctctctggcttatcgcgataatacccggcgcgttgtgggttaaatcgcgatgggggctggcctggcagtaaaaaacagggttcgccggactggtagtgatagtccacgtcagcaatccactgccctgtggtcgcgggattcggttgtttttcgttacccaccgcccagaaaaaatgtccgttgccatctgtgggataaagttcgcgttcctccagtcggtaatagccatcggcaaagagtgaaaacagcggcgtcagggcggtaaatgcttcgttcaacccgactcctggctgattccactcggcaagtgaggataaaaactccgcggcgccttcatcatcattgctaaaaccggcataaacaaattctgcgcaggtcgggcaccaggcttcagtgtaaaaacgaatcagcggcgagccatgccaggaaagcgtatgaataccggcgtcagagtcgggatcgtggataacgctgggacgaagcaatgcttttccgttacgtactgaaaacgtaatatgggctacatcgtgctgtagcaggctgatttcaggtctattgttacgccaaaacatcgctgttcatccctggattctactttgcgctttatgcgtagtattgcagccgttccgccagcaaatcgacaaatccctggcggtctacatcgaccatcaccgtcgcattcggcttattccccgtcaggaaataataatccaccaccgtcatcccctgggtgtatttcccctgggtttccacgccgacccaacgctcaacggtggtgaaaatctcgggcttgagcagccaggcgatggtgcacgggtcgtgcagcggtgcgccgacaaatccccatttttcgtctttgtggtactccataaagaagtccagcagttcggcgacgatggtggaaatcgggttaccgatggcgcgaaagcgttcgatatcggcggcgtgaatctgtgccttatgagtgacgtccagcccggccatcaccaccggaatgcctgactggaagacaatttctgccgcttccgggtcgacgtaaatattaaattccgcagcgggcgtccagttacccagcgccatcgcgccgcccatgatcacaatgcgggcgattttcgtatgcagttccggatggctattcagcagcagcgccacgttggtctgtgggccagtggagacgatggtgaccggttgtgcgctctcgcgcagcgtttttgccatcagctcaacggcagtgccgctttgcggggcgaatgacggctcgggcagcgccgggccgtcgaggccgctttcgccgtgaacgttatcggcgataatcagttcgcgcatgagaggtttcaccgcgccgcccgccaccggaatatccaggcgtttgagcagtgtcagcatccgcagcacgttgcgcagggtcttctccggcgtctggttaccggcggaagaggtgatcgctttcacttccagttcaggggaggcgagggcgagaacgagggcgatcgcgtcatcatgacccggatcgcaatcaataataatgggcagtgccattgtggctccttgtaagcggtactttgtgacaaggttaacgcccggctggatacgtttcgagaagcgaagaagtaaagcgtgagatagcgcgcactctgacgtgcgcgccgggaagattagtgcaggattttcgcaaggaagtcttttgcgcgatcggaactggggttagcgaagaactcctcttttggcgaatcttcgacgattttaccttcatccataaagatcacccggttagccactttacgggcaaagcccatttcgtgcgtcaccaccatcatggtcatcccttcgttcgccagctcgaccattacgtccagtacctcgttgatcatttccggatcgagcgctgaagttggttcatcgaataacatggcaatggggtccatacatagcgcgcgggcgatcgccacgcgttgttgctgaccgccggaaagctgcgccgggaacttgttggcatgtgcagacaggccaacgcgctccagcagcttcaggcctttatcgcgggcggcggccttatcgcgtttcagcactttcacctgcgccagcgtcaggttttcgatgatcgacaggtggggaaacagctcgaagtgctggaataccatgcccacgcgggaacgcagtttcgccagatcggtttttttgtcgttcacaataatgccgttaacggtaatttcgcctttttgcactggttccagaccgttgacggtcttaattagcgtggatttaccggaacccgatggcccgcagactactaccacctcaccttttttcacttctgttgaacaatcggtcagcacctgaaagtgaccataccattttgaaacatttttcagggtaatcattaaacagtccttttcttcaaatagctgaccagcaacgacgcgctcaggctgataacaaaataaacggcgccggcgaacagaatcatttcgacctgagtaccgtcacgctcgccgatagtcgacgcggtgcggaagaagtccgccaggctgagtacataaactaaagaggtgtcctgaaatagcacgatgccctgcgtaagcaacagcggcaccatcgcccgaaacgcctgcggcagaataatgagcttcatcgactgccagtgggtcatccccagcgccagcgcggcgctggactgcccgcgggaaatactttgaataccggcgcgaataatctcggaatagtaggccgcttcaaacatggagaatgccaccatcgcggagatcaggcggatatcggttttcggcgatagtcccagcacgttttgcagaaagccgggtacaatcagatagaaccacagcaagaccatcaccaacgggatggaacggaaaacgttaacatacgctttagcaaaccaggcgataggggcaaagcttgagaggcgcatgacggccagaatggttccccagactatccccacgataacggcggtgacggtgatcttcagcgtgatgaccaacccggccagtaggtaaggcagtgaggggataatcgaactccagtcaaattcgtacattatttgctccccacgttgcccggcaggcggactttgcgttcaaccaggctcatgaccagcatgataacggcgttaatcagcacataggccagcgtaatggcggtgaaggattcccaggcgtgcgccgagtaatccaacagtttgcctgcctgcgccgccatatccaccaggccgatggttgaggcaatagccgagtttttcaccaggttcatcatctctgacgtcattggcggtacgataacgcgataggcattcggcagcaggacatagcgataagcctgcggcagcgttagccccatcgccagcgccgcgttcttctgcccgcgaggcagagactgaatcgcggcgcgcacctgttcgcaaacgcgggcggcggtaaacagtcccagacagatcattgaggagaggaaaaactgaatattgggatcgagttccgccttaaaccacatgccaagatcttccggcaacagttcaggcaccaccaggtaccaggtgaagaattgcacgatcagcggcacattacggaacagttctacgtacaacgtgcccagtccggagaggaaacggttgggaacggtacgtaaaatgccgaaaatagatcctaccaggaaagcgataatccaggcggtaatcgaaagggcgacggtgacctgaaaaccactccatagccagccgagataggtggtattgccgaagggggcttcctgtaaaaaaataccccagttccagtctattgacatacatctactccgaaaaaaaagggtagcagcgctaccctcgaagattgttgcccggcgatttgcggcttcaggcccgatggggaacgaccatcaggcttatagtctgtccgtgctgagcgacaatcgagaggacaggagtcccgtcccatttagttttagttagttaagcgctttatcattcggtgctttgaacagggctttcatctcgtcagacaactcgaaattcatgttcaggtttttcggtgggatcggatttttaaaccacttatcaaaccacttttccgcttcgccggaggtttgcgcctgggcgatggtatcgtccatcagctttttaaactcagggtcgtttttacgcagcatacagccgtaggcttcctgggactgcggtttaccgacaatctcccagttatccggtttcttggctttggcgcgctcgccggccagcagcgcgtcatccatcataaaggcgacggcgcgaccgctttccagggtgcggaacgagtcaccgtggtctttcgcgctaataatacgcatccccatcttttgctcttcgttaagcttatgcagcagaatttcagaggtcgtcccggaggtgacgacgaccgctttgcctttcagatccgggaaatctttaatatcgccgccttttttagtcagcagtcgcgtcccgacgacgaaaatcgtatcggagaaggcggcctgtttctggcgctcaaggttgttagtcgttgaaccacattcaaaatcgaaggttccgttttgcaatagtggaatacggttttgcgaggtgatcgggatcagcttcacctgcagatcgggcttgttaagtttcttttttaccgcttccacaatggcgttggagtagtcctgggaatagccgaccactttctgctggttgtcgtaataagaaaagggcacagaagattcgcgatgcccgacgacgatcacgccatttttagcgatcttgtccagggtgctaccagcggcaggcgcgccatcttctgcgtgcgcaaggcccgcagacagtcccatgaccagcattgctgtggttagcttacgtaattgcatatccaactcctttatcatctgcgccgtcgacgcattgatagctattgtgatgttgttattgcctgcaacttgcgcgtgcagtgttatgtgtgtttgttaacatttagtgtggcttgttgtaaatattttgctgcgatattgtttatttttgcgaagtgcgccgcaccgttcagaggcaaaaatcctacattgcaccgttcaggtgctaccgatgatcgattttggtgcgaccaggttgcacaagcagccagaacaggtttgccatgtttaacaaagcaatagacgtgccagaatgggggaaaaaggaggattttcaggccggataaatgaagcgctatccggcctggggagagattatttccgtcgttgtcgcagactcatcactaccgcgccaaaagcaaacagcgcggtcagtacccatagcggccagttgccggtacgggcatagggagttaaccccgtggttggcgtgacattggtggtcagtacctggcgtgtgaactgcgggatcatcgcctgaatctcgccctgagggccaatcaccgccgtaataccgttattagtactgcgcagcaacggacgcgccagctccagcgaacgcatccgcgccatctggaaatgttgccacgggccaatggacttaccaaaccaggcgtcgttagaaatcgtcagcagatagtcggtgtccgggcggaagttatcccgcacctgttcgccaagaataatttcatagcagattgccgccgtcagcttatagtcgtgcgcatgtaactgcggctggatataagggccgcggctaaaggaggacatgggcagatcgaagaacggcgccagcggacgcaggatagactccagcggaacgaactcgccaaagggcacaaggtgatttttattgtagcgattgggcgagtcataactgtatggattatccttgcccaacgtaataatcgtattgtaggtgtcgtatcgattctgtttattgagacgcgcatcgacaataccggtgatcagcgtgctatttttttcgcgtaacatctcgtccagcgaacgaaggaagggctgctgattgatttcgagatccggaatcgccgactcaggccagataataatctgtgatttgcctaactctgggcgagtttcgttgagataaatttttagcgtattcagtagctggttttcgtcccacttcagcgactgcgggatatcgccctgcaccagcgatacctgggtcgctttggccggttccagcgtaaaccactggatataacgtagcggaaagggcaaagcaaacagaatcacggcgacagccagcggacgccagttccgcgtcgccagtgccagcgctaacaggccgctgaccatcatcagcaggaagttgatcgcttcgacgcccattaccggcgccaggccttttagcgggccatcgacctgactatagccaaattgcagccaggggaagccggtcagcacccagccgcgtaaaaattcggtgatttgccatattgcaggcgcggcgatagcgacgcgcagccagttggtttttggccacaggcgcgacaaaatcccggcaaacagtccggtatacagcgagagataagctgcaagcagcaccaccagaaaaacgttaaccgggcccggcatgccgccaaactgcgcgatactgacataaacccagttaatcccgctaccgaaaagtccgagtccccagcaatagccgatggcggcagactggagcgggcggcgattaaacgttaaggcctgcagcccgataagcgacactatcgctgcgggccagacgtcatacggagagaaagccagtgttccgcaggcgccgaataataacgccagcagcaggcgaatacgctggcgttcaattaacgaggcaaatgccatttttagtccactattgctgttattcgtccagttttggctggggcgagtcatccgggatcctgacatgcacctgaataatacgacgactatcggccatcgccactttgaactggtaaccatcaatgtcaatggtttcgccgcgggccggtaaatggccgaacgcctgcatcaccagcccgccgatggtatcgacctcttcatcgctgaagtgggtgccgaaagcgtcattgaagtcttcaatcgacgccagcgcgcgaatcgtccaggtatggcggctaagctgacggaagtcgatatcgtcttcttcgtcatactcatcttcaatttcaccgacaatcagttcgaggatgtcttcgatagtcacaaggccggaaacgccgccaaactcatcgataacgatggccatatggtagcgctgggagcggaattccttgagcatacggtcaacccgtttgctttccggtacgacaaccgcggtgcgtaacactttgtccatgctgaaggcttcggcatcgctgcgcataaacggcagcaaatctttggccatcagaatcccttcaatgtgatctttatcttcgctgatcaccggaaaacgcgagtgggcggactcgatgataacatcaagacattcgtccagcgtctggttgcgttttagggtaatcatctgggagcgcgggatcataatatcgcgaacgcgctggtcggcgatgtccattacgccttcgagcatatcgcgcgtatcttcatcgataagctcgttctgcccggaatcacggatcagcgccagcaactcatcacggtttttaggttcaccgtggaaaagctggctgagtagcagggaaaaaaatccctttttactgtttactgtgtcactactgtgtgaattgtcgtcgctcatggcgtcgtatgggttctcatgttagttaatacaaagctcgtcatgcgtatactcagctgtgacggcatgttttgcctgatggcgctacgcttatcaggcctacaaaaggcatgaatgtaggccggataaggcgcaagcgccgccatccggcaagctactattctgcaatcttctcggcaatgtacggatcctcatagcccatagcaagcataatctccgtttcgagagactccatctcttccgcttcgtcatcgtcgatatgatcgtaacccagcaaatgcaggctaccgtgcacgaccatgtgcgcccagtgcgcctccagcggcttgctctgttcttgcgcttcctgctccacgacctgacggcaaataatcagatcgcccagtagcggcatttcaatgccggcgggcgcttcaaacgggaaggagagaacattagtgggtttatctttcccgcggtacgtcaaattaaggtcgtggctttcggcctcatccaccagacggattgtgacttccgcctcttcctgaaactgcggaataacgccgtccagccagcgttgaaactgagcttcatccggcaggcccgcgtggttttcacaggccaactgtaaatcgaggatcacctggctcatttctgttcctgctcctgggcttcacgcttacgctctgccgccaacgccgctttgcgtttttgttcggcctcttcccaggcttcataggcgttaacaatgcgggcaacgaccggatggcgcaccacgtcttcgctgtggaagaagttgaaactgatttcatcgacttccgccagcacttcaatggcatgacgcaagccggatttggtgttgcgtggcaggtcaatctgcgtcacgtcgccggtgatcaccgctttcgagttaaagccgatacgcgtcaggaacatcttcatctgttcgatagtggtgttctggctttcatccagaatgataaaggcgtcgtttaatgtgcgtccgcgcatataggccagcggcgcgacttcaatcacattgcgttcaatcagcttctcgactttttcaaagccgagcatttcgaacagcgcgtcatacagcggacgcaggtacgggtccaccttctgacttaaatcgcctggcagaaagccgagtttttcgcccgcttccaccgccggacgggtcagtagaatacggcgaatctcctggcgctccagggcgtctaccgcagcggcgaccgcaagatacgttttaccggtacccgccgggccgacgccaaaggtaatatcatgatcgagaatattggcgatgtactgcgcctggttcggggtacgcggtttaatcacgccgcgcttggttttgatattaatagctttgccatagtcaggcacgctttccgcgctctgttccagcacccgcgcttctttgatcgccagatgaatttgttccggttcgatatcctgagtctggccgcgcatcggtgcggtatcgacatacagacttcgcaaaatatctgtcgccgcggtcacgcaaatcggacgaccggtcagtttaaagtgattgtcacggcggttgatttcaataccgagacgacgttcgagctgtttaatattgtcatcaaacggcccgcaaaggctcaacagacgggcgttgtctgcgggctcaagggtaatttcgcgagtgtctatattcaaactgttcctcttgtgtctgtatcgccggacgctgaacacttaccggcatctaaggaaattattcacgccatagggaaaaggcgcaagcattgcaatgaagatggggatgaagagagaaaattgcaaggcccgtcgggcgacaggccatgaccaggaagcccgacaggcgtagcgccatcgggcattattgccttttcagcagggttaaggctggtagaatcctacgcccagctcattttctttacgggtacgggcaatgacggactccggcgtttcggcgacgcgcagccccatttcatcttcggtacgcaccacttttccgcgcagggagttcggatagacgtcagtaatttccacatcgacaaacttaccaatcatctccggcgtgccttcaaagttcaccacccgattgttttcggtacggccagacagttccataatgtttttacgcgacgtgccttccaccagaatgcgctgtgtcgtgccgagcatacggcggctccatgccatcgcctgctgattgatacgctcttgcagaatatacagacgctgcttcttctcttcttccggcacgtcatcaaccatatcggcagccggcgttcccggacgcgcagagaagataaagctgtagctcatatcaaagttgacgtcagcgataagcttcatggttttttcgaaatcatcggtagtttcgccagggaatccgacgataaagtcagagcttatctgaatgtccggccgcgccgcgcgcagtttacggatgattgctttatattccagcgcagtgtgggtgcgccccatcagattcaacacgcgatcggaaccgctctgtaccggcagatgcaggaaactgaccagttccggcgtatcgcggtatacctcgataatatcgtcggtgaactcaatcggatggctggtggtaaagcgaatacggtcaatgccgtcgatggcggcaaccagacgcagcagatcggcaaaggtaccggtggtgccgtcgtagttttctccgcgccaggcgttaacgttctggcccagcaggttgacctcacgcacgccctgcgccgctaactgggcgatttcgaacaggatatcgtctgagggacggctgacttcttcaccgcgggtatacggtaccacacagtaagtacaatatttattgcagccttccatgatagaaacgaaagcggtcgggccttctgcgcgcggttccggcaaacggtcgaacttctcgatttccgggaagctgatatcgaccaccgggctgcggtcgccacgcacggagttaatcatctccggtaggcggtgtaaggtttgcgggccaaaaataatgtcgacgtaatgggcgcgttgacgaatgtgctcgccttcctgggaagccacgcagccgccgacgccgataatcagatcgggatttttctcttttaacagtctccagcgacctaattgatggaagactttttcctgagccttctcgcggattgagcaggtattcaacagcagcacatccgcctcttccgccacgtcggtcagttgatagccgtgggtggcgtccagcagatcggccatcttcgatgaatcgtactcgttcatctgacagccccaggttttaatatggagttttttagtcatcgacttgctcttgcgaaatagtggctgaaaagcagggcgcatagtgtaatgctttggcgcggttgtgaccagtatgactgacgtcagccctaatgggtaaaaaatcctgtaaacttgtctaaaacgtaacaggatgaatgaccatgacaaatcaaccaacggaaattgccattgtcggcgggggaatggtcggcggcgcgctggcgctgggtctggcgcagcaagggtttacggtgatggtaatagaacatgccgcgcctgcgccgtttgtggcggacagccagcctgacgtgcggatttcggccattagcgcggcatccgtggcgctgctcaagggactgggcgtttgggaggcggtgcaggggatgcgtagccatccttatcggcgactggagacctgggagtgggaaaacgcccatgtggtgttcgacgccgctgaactcaagctgccgctgttaggctatatggtagagaacaacgtcctgcaacaggcgctatggcaggcgctggaagcgcaccccggcgtgacgctgcgcgttccggcttcactggcggcattgcaacgccgccacgatggttatgcgctggaactggccgacggcgaatgtatcacgccgaagttagtgattggcgccgacggcgcgaattcgcaggttcggcaaatggcgggaattggcattcatgcctggcaatatgcgcagtcgtgtatgcttatcaccgtcaagtgtgaaaatgcgccaggcgacagcacctggcagcagtttacgccaacggggccgcgcgcctttttgccgctgttcgatgattgggcgtcgctggtgtggtatgacgctccggcacgtattcgccagttgcagggtttatcgatgacgcaattgcaggtggaaattaaccagcactttccggcgcgtctgggggcggtgatgcctgtcgcggcgggcgcgtttccgctaacccgtcgtcacgcgttgcagtatgcgcaaccggggctggcgctggtaggcgacgcggcgcataccattcatccgctggccgggcagggcgtcaacctggggtatcgggatgttgatgcgttgattgatgtgctggcgagtgcccgtagctatggcgagtcctgggccagccattcggtgttgaaacgctatcagacgcggcgcatggcagataattttatgatgcaaagtggaatggatctgttttatgccgggttcagcaatgaactgccgccgctgcgtattttacgcaatatggggctgatggcggcgcagcgcgcaggcgtgctaaaacgtcaggcgcttaagtatgcgttggggttgtaacccgttgaatgccttacccggtttgtaaaaacgctcaattgcaggtcgggtaagcgtattgacatcttactttactgcaaataaagcacataaacctaatttccctttaaaatcaatttcataccaaggtgatgccatttcaattgtgcatacgttgtattggcaacgtactactttatgtagcatcagtaatgtggaactcattgattttacaagaatcgccagggtgattaatgcggcgataatccgataccacgtcagtgttgcatgttggacatcaaaccacagaatataaaaagtgatgatgtgaagaatgactttgctggacagggcgcgaatatagaatccacgcagcgccgttttcgaggaaaacgcgacattaatcagcgcgctttgtttttcttgcacagggatccctggcagatacactatccattccgcactattctggcgcaacatgacggcctttttctggtgcagtatatgtagcctcattgacactgccacggggtaaaccagacccaaaataatcaaccaggcggcgctggccgtgatatcaatgaaggtgaaagcgcagagcaagacgaccataaaaaatgttaatggccgcaaaaagagataccaacaaaactggtaattcattgtgaggttaccgaacgatccctgtaaggctttatcatagcgttttactgatagcagggcattaagggggaaacctctttcggaatttataaacgcagaaaagcaaaaagctcgccgaagcgagctttttaaaggtggctggggtacgaggattcgaacctcggaatgccggaatcagaatccggtgccttaccgcttggcgataccccaattgtcgtacttcttgcgctcattagcagagcgtctttaaaactggctggggtacgaggattcgaacctcggaatgccggaatcagaatccggtgccttaccgcttggcgataccccaacaaattattttcgaaccggtcgaatacctcgacgtgttctgaatatggtggctacgacgggattcgaacctgtgaccccatcattatgagtgatgtgctctaaccaactgagctacgtagccagatgatttcttcgatggctggggtacctggattcgaaccagggaatgccggtatcaaaaaccggtgccttaccgcttggcgataccccaataccgtcgcggtgaaccgcaaactcgaagaaatatggctggggtacctggattcgaaccagggaatgccggtatcaaaaaccggtgccttaccgcttggcgataccccatccgtacaacgcttatcggtgaatggtgcgggaggcgagacttgaactcgcacaccttgcggcgccagaacctaaatctggtgcgtctaccaatttcgccactcccgcaaaaaagatggtggctacgacgggattcgaacctgtgaccccatcattatgagtgatgtgctctaaccaactgagctacgtagccatctttttttcgcgttaccttatcggcgttgcggggcgcattatgcgtattgagccttgaagcgtcaacctctttttcatcgaaaaacgtcggaaagtgtctgtttggttaggttgcgaacagcgtggcgcaatattcggcaattattggttattaatcgtttttccgaaagtagtttgctataaaaaaagagcccctaagggctctttcgtcatcgttaatttactggtacgccgactgatgcacgccgaccgcgcggcctgacgggtcatccatcgttttgaatgcttcatcccactcaatggctttggcggaagaacaggccacggacgggccgccgggtacgcattccgccgcgctcggcaccgggaacagctcttcaaaaatttcgcggtacagatacgcctctttagacgacggcgtgttgtatggaaagcggaagcgggcggtttccagttgttgatcggaaatctgtttcgccgccacctctttcagcgtatcaatccagctgtaacctacgccgtcagagaattgctctttctgacgccacgcgacgcttgctggcagataagactcgaagcactcgcgcagcacgtgtttttccatcttgccgttgccgcacattttatcctgtgggttgatacgcatcgccacgtcgaggaattttttatccaggaacggtacgcgcgcttccacgccccaggcggacatcgctttgttggcgcgggcgcagtcatacatatgcagcgcctgtagcttacggaccgtctcttcatgtaactctttggcgttcggcgctttatggaagtacaggtagccgccaaacacctcatcggaaccttcgccggagagcaccattttgatgcccatcgctttgatcttacgcgacatcagatacatcggcgttgaggcgcggatagtggtcacgtcataggtttcaatgtggtagataacatcacgaatggcatcaaggccttcctgcacggtgaagtgaatttcatggtgcacggtgccgaggtggttagccacttcctgggccgccttcaggtcaggcgaaccttccagaccgaccgcaaaagagtgcaactgtggccaccaggcttcggagcgctcctgatcttcgacgcgacgggcggcgaattttttggtgattgccgaaataaccgacgagtccagaccgccggagagcagcacgccataagggacgtcggacatcaggtggcttttcacggattcttccagcgcctggcgcagcgcgtttttgtcggtaacgttgtcttttaccgcatcgaactcaaaccagtcgcgctgatagtactgacgaatttcgccgtctttgctccacaggtagctgcccgccgggaactctttaatggtgcggcagaccggggtcagcgctttcatttctgacgctacgtagaagttgccgaattcgtcataacccatatagagcggaataataccgatatggtcacgaccaatcagataagcgtctttttcgctgtcatacagggcgaaggcgaacatcccctgtaaatcgtcaaggaaatccggccctttttcctgatacagcgcgagaataacttcgcagtcggagcctgtctggaacgcgtaacgatcgccatactccgcgcgtaacgtctgatggttataaatttcaccgttcaccgccagtacgtgggtttttctggcgttatacaggggctgggcgccagcgttaacatcaacaatcgacaagcgttcatgtgcgagaatcgcgttatcgcaagcgtagatgccggaccagtccgggccgcgatggcgcatcaggcgtgacagttcaagggcttttttacgcagttccgctgcatctgttttgatatcgaatacgccgaaaatagaacacatagccttctccgttaatctgttgcgtcgtactttttgtatttgcttgactaaaaaatgccgcaaaggcgtggaaggcgcaaggggattacggtctgaaaaatgaaaaatgcaatcgtcattgttgattagtgaaaaatgattacgtattgcgcggatttattgatggatcttcagttttatcgtggattaattgaattatgtttttcctgatggcgtttcgcttatcagacctacaatgttgttcgaaccgtaggcctgaaagctatgcgtcatcaggcagaggacaggtttagataacgtctatctcggcgacggaagggtaaatccagcttgggcggaacggcatactgtcaatatcattgatcgttgatacgcctgaaagcaccagaatggtctccagaccggcctggaaccccgccagaatgtcggtgcgcaggttatcgccgacaataacggtctcttccgagtgcgcctgcattttgtttaacgccgcgcggatgatccacgggctgggtttgccgacataaaatggcttccggccggaaattttttcaatgcctgcgcacagcgcgccgcaggccggataaaagccgcgaccgtgggtatccgggttggtggcgataaagcgcgcgccattggcgacgaaaaatgctgctttatgcatcatgtcccagttgtaggagcgggtttctccaacgatgacaaaatcagggttcacatcggtaatggtaaaacccgctttatagagctcgtgaataagcgcgccttcgcccacgacatacgcttttttaccttcctgacggcgcagaaaatcggctgtcgccattgctgacgtataaaacacgctgtccggcacgttaacgccagcggtagcaaaacggttcgccagatcctggccggtttgcgatgggtaattggtcagcagcaccagcggcagacctttttccagaatccccgtcagaaattccgccgcaccgggtacggctacgttgtcgtgcatcagcacgccgtcgatatcgcagattacattcttgatggtcatgaactacccagggaatttgtgaataatccgatactataagagcgcatcaactttccagcaaacattgcagcaatgttccgttgagcatggcgcgtttaactaaggcaaatgcgccgatagcagaacggtgatccagcgtggagcgtaccaccggcaaatttttgcgaaatgcctttaacgcctgcgtattgatacagctttcgatagcgggtaacaggactttatcggcttcaatgatctcgccggcaatgacgattttttgcggattaaacaggttgatagcaatggcgatcgttttgcccaaatggcgaccaacatgctcaatgacttccgaggccaggctgtcgccccggtttgccgccttacagatggttttaatcgtgcagtcgtcaagcggaacacggctttgatacccttgtttaagcaaattcagcacccgttgttcaatcgccgcattggcggcaatggtttccagacagccgaaattaccgcagtggcagcgctcgcccagcggctccacctgaatatgcccaatttcaccgacgttgccgttacggccaatgaagatgcgtccgttggagataatcccggcgcctgtaccacgatgaacgcgcaccagaatcgagtcctcgcaatcctgactggcgccgaagtagtgttccgccagcgccaggctacggatatcgtgtcccacgaaacaggtaacgtgaaaccgtttttccagcgcttcgaccagtccccagttttcaacctgaatgtgcggcatgtaacgaatcacgccgctttccggatcgacaagccctggcaggatcaccgagatagcgatcaattcacgaattttacgctgacagctatcaataaagacggcgatagtgttgagcagcgcatgttccagcgtctcctgggtgcgctccggcagcggataatgctcctcagcgaccactttactgctcagatcgtagagcgttaaagtggtgtcatgacgccccaggcgaacgccaatggcgtggaagttacgggtttccgtgacgatagagatagcgcggcggcctccggtagaggcctgctgatcgacttctttgatcagcccgcgttcaatgagttgacgcgtaattttcgttacgctggcgggagcaagctggctttgctcggcaatttgtatgcgcgagataggaccatgctggtcaatcaggcggtaaacggccgcgctgttaagctgttttacgagatcaacgttacctatctgagcttgtccgcctggtgtcatattctcacttactcaagtcaacgacctcgtcaccattaacgatggtcttgataattttaaaatcgtgggtgaacgcggtcaggttggcgactttacccggcgcaatgctaccgagatgtttatcaacgccgatagcgcgagccggatagagcgttgccatgcgcagcacttcatccagcgcgatgccgcaatgcgcgaccaggttgcgtacgccttcaatcatggttaaggacgaaccgctcaacgtaccgttttcatccacacacagtccattgcggtagtatattgttttacctgcgaaaatgaactgctcaatattggcccccgccggtgcggtggcgtctgtcaccagacaaagtttgtcgcctttcaggcgtttggcattgcgaatgttggcgtagtcgacatgcagaccatcggcgataacgccgcaataaatatccgcttcgtccagaacagcgccagcaaggcccggctcacgccctgtaatgtacggcatcgcgttaaacaggtgagtcgcaaaggtaatcccggcgcggaagcccgctttcgcctcttttaacgtcgcgttggagtgacctgcggaaaccacaatgcccgcattcgccagtttagcgattacgtcagcaggcaccatttccggcgcgagtgtgactttggtgatgacgtcggcattatcgcataagaaatcgaccagcgcagcgtctggtttacgcacgaaatcaggattatgggtgcctttttttaccagattaagccaggggccttccaggtggagacccagcgcctggtgcggatgtttttccaggtattcgcgcatgacgcgaatgccctgtttcatcaattcgtcgctggtagtgataagcgttggcagaaagttagtacagcccgatttttcattggctttctgcataatttccagcgtttcaacgctgacggcttctgcggtatcgttaaactgcacgccgccgcagccgtttagctgcacatcaataaaaccgggggagagaatggccccattcaatgagcgttgttctattcccggcggcagttcggccatcggacaaacgcggtcaatcaggccattagcgacaacaagcgcatggtcatcaagaatttcgtgaccggtaaagatccggccctgggttaaagcatacattccgacccccgatatcaaaaatttaccgccccgcattgactggcggggcggagacaacattacagacctttaatattttctgcttctaattcattgaaatatttcaatgttttaactttaagttccattgtggacggctcatcgcataccacaaccgctttcggatggagttgcaggcagctaatggtccacatgtggttgacgttgccttcaaccgccgcctgcagcgcctgggctttctgatggcccagcaccagaatcatcacttcttccgcatccagcagagtacccacgcctaccgtcagcgcgtatttcggcacctggtttacgtcgccgtcaaagaagcgggagttcgctacgcgagtatcatgggttaacgttttgatacgggtgcgggaagccagggaagacgccggttcgttaaaggcgatgtgaccgtcgttgccgacgccgcccataaacagatggattttaccgtaagaacgaattttttcttcatattgacggcattctgcatcgatatccggtgcgttaccgttgagaagattgatgttttctgctggaatatcaacgtgatcgaaaaagttacgatgcataaagctgtggtagctttccggatgctctttcggcaggccaacatattcgtccatattaaaggtgaccacatgcttaaagctgacctcgcccgctttgtgcatctcaaccagcgctttgtacgccgttagcggcgtgccgccggtaggcagtccaaggacaaacggacgatcggcggtcggtttgaacgcattaatacggttaacgatatggcgagcggcccatttgccaacctgttctgcggtactcagggggatcagtctcattcttcacctcaataatcaatgtcaaaatttggcggatcgtattaagcgtaacctggatatccagggttcgtgttcaatccgtcctgattttttgaatcataaaataagttttctgtgttagccagtggatggtaggggtgattacgatatttagtgattataatcacaaaaaacacccgtttaatttgcgaggcgaattaattttccacacactctgcagaagatgatctcaccgttcgattacagaacatcacgtttttaacgtttgcagcacaataaaaaacggcttcaaagaagccatatcggcgtctcgtagggggaataagatgaatattttaggttttttccagcggctgggtagggcgttgcagctccctatcgccgtgttgccggtggcagcgttgttgctgcgattcggccaaccagatttgctgaatatgccgtttatcgcgcaagcgggcgggtctattttcgataacctggcgctggttttcgctatcggcgtggcctccagttggtctaaagatagcgcgggcgcggcagcgctggcgggagccgtgggttacttcgtcatgaccaaagcgatggtgacgattaacccggaaatcaacatgggcgtgctggcggggattattaccggtctggtcggcggcgcggtttataatcgctggtctggtatcaaactgcctgattttctcagtttcttcggtggaaaacgttttgtaccgatcgcaacgggctttttctgtctggtgctggccgctattttcggttacgtctggccgccggtacagcatggcatccatgcgggcggtgaatggatcgtttccgcaggcgcgctgggttccggtatctttggcttcatcaaccgtctgctgatccccaccggtctgcatcaggtactgaacaccatcgcctggttccagattggcgaattcaccaatgccgcaggcactgtattccacggcgacatcaaccgcttctatgctggcgacggcacggcggggatgtttatgtccggcttcttcccgatcatgatgtttggtctgccgggcgccgctctggcgatgtatttcgccgcgccgaaagaacgtcgtccgatggtgggcggtatgctgctgtctgtcgcgatcaccgcgtttctgaccggcgtaaccgagccgctggaattcctgtttatgttcctggcgccgctgctgtacctcctgcacgccattttgactggtatcagcctgttcgtcgcgacgttgctgggtatccatgcgggcttctctttctcggcaggcgcgatcgactatgttctgatgtataacctgccagcggccagcaataacgtctggatgttgctggtgatgggcgttgtattctttatcatctacttcctgctgttcagcgcggttattcgtatgtttaacctgaaaacgccgggccgcgaagataaagttgatgagatggtaacggaagaagccaacagcaacaccgaagaagggttaacgcaactggcgaccagctatattgctgcggttggcggtacggacaacctgaaagcgatcgatgcgtgtattacccgtctgcgcctgaccgtgaatgactctgctcgcgttaacgatgcggcctgcaaacgcctcggcgcttccggcgtggtgaaactgaacaaacagaccattcaggttattgtcggcgcgaaagcggaatcgattggcgatgaaatgaagaaagtggtggcgcggggaccggtcgcggcagcgtctgctgatgcggctcacgttgcaacacctgctccggcggccaaaccccaggcggtgccgaatgcggtaactatcgctgaactggtctctccgattaccggtgaggtagtggcgctggatcaggtaccggatgaagctttcgccagcaaagcggtcggcgacggcgtggcggtgaaacccaccgataaaaccgtggtttctccggcggcgggtactatcgtgaaaatcttcaacactaaccacgcgttctgtctggaaaccgaaaaaggcgcggagatcgttgtccatatgggtatcgataccgtcgcgctgaacggtcagggctttaagcgtctggtagaagagggtgcggaagtcacggcgggtcagccggtgctggaactggatctggacttcctgaatgccaatgcgcgttccatgataagcccggttgtttgcagcaacagcgatgacttcagcgctctggtcatcaaagcggatggtcacgtggtagcgggtaaaacgccactgtacgagatcaagagcaaataatcgcttcctggccggataaggcgtaagacgccatccggcgatatcacaggaaacataagcggcagagggaaaccttcgccgcttttttttaccgcaattagccccaatattttctgcaaagccactttttaagtaactaaaggttgtcagtctgtccggcttataagatcatatgccgttatacgttgtttacgctttgaggaatccacgatgagtgaggctgaagcccgcccgactaactttattcgtcagattattgatgaagatctggcgagtggtaaacataccactgtccatacccgttttccgccggagccgaatggctatctgcatatcggccacgcgaaatctatctgcctgaactttggcatcgcgcaagattatcagggccagtgcaacctgcgtttcgatgacaccaacccggtaaaagaagatatcgagtacgttgattcgatcaaaaacgacgtcgagtggttaggctttcactggtctggcgatattcgctactcctccgattactttgaccaactgcacgcctatgcggtcgagctaatcaataaaggcctggcctatgttgatgagctgacgccggagcagatccgtgaataccgcggtacgctgaccgcgccgggtaaaaacagcccgttccgcgatcgcagcgtcgaagagaacctcgcgctatttgaaaaaatgcgtaccggcggttttgaagagggtaaagcctgtctgcgcgctaaaatcgacatggcgtcgccgtttatcgtgatgcgcgatccggtgctgtatcgcattaaattcgccgagcatcatcagactggcaacaagtggtgcatctatccgatgtacgactttactcactgcatcagcgatgcgctggaaggcattactcattctctgtgtacgctggagttccaggataaccgtcgtctgtacgactgggtgctggacaacatcaccattccggttcacccgcgccagtacgaattctcgcgcctgaatctggaatacaccgtgatgtccaagcgtaagctgaacctgctggtgaccgacaaacacgtcgaaggttgggacgatccgcgtatgccgactatttccggtctgcgccgtcgcggctataccgcggcttctattcgtgagttctgcaaacgcatcggcgtcaccaagcaggacaacactattgagatggcgtcgctggaatcctgcattcgcgaagatctgaacgaaaacgcgccgcgcgcgatggcggtaatcgatccggtaaaactggttatcgaaaattacccgcagggtgagagcgaaatggttaccatgcctaaccatccgaataaaccggagatgggcagccgtgaagtgccgtttagcggtgagatctggatcgatcgcgcagatttccgcgaagaagcgaacaaacagtacaaacgtctggtgatgggcaaagaagtgcgtctgcgtaatgcctacgtcattaaagcggagcgcgtagagaaggatgccgaagggaatatcaccaccatcttctgtacctatgatgctgatacgctgagtaaagatccggctgacgggcgtaaagtgaaaggcgtaatccactgggttagcgcagcacatgcgctgccgattgaaattcgtctctacgaccgtctgttcagcgtgccgaatccgggcgccgcggaggacttcctgtctgttatcaaccccgaatcattagtgattaagcaggggtatggcgagccgtcgctgaaagcggcggtagcaggaaaagctttccagtttgaacgtgaaggctacttctgcctcgacagccgctatgcaacggccgataagctggtctttaaccgcaccgtgggcctgcgtgatacctgggcgaaagcgggcgagtaagcactgcgccaacaggcgaatgctgtaaaaataccttgtcaacgccgcgttctgcggcgttttttctctgcatttctaagtcgattctcttttttgcgaggcgaattaattattctctgaaaattattgatctgataaatgattattaatctaaatgttataagcgtcaggtcaacaggagacaattattttcatgcctatggaaaacaagtcaattttctttctggcggtctgcttcccccaccagcagtcgaatgtaacagaaagcaattaaatatgtgcggttgctcatattattacatactggttacagaaagagattgataattcgcatcgcgaaaaatagtctatttaacgtagtaaatgaggtttctcagcgctactttttattttttcgctgttcgcttttgtcggcagcaatttatacgtcaaagaggattaacttatgcgtacgtttagtggcaaacgtagtacgctggctctggctatcgccggtatcacagcaatgtcggggtggatcgttgttccgcaggcgcaagcctccggctttttcgacgactccacgttaacgggcggcatctattattggcagcgtgaacgcgatcgcaaagatgtgaccgacggcgacaaatataaaactaacctttctcatgcgacctggaacgctaacctggattttcagtctggttacgctgcggatatgttcggtctggatatcgcggcgtttaccgcgattgaaatggcagaaaacggcgacagcggtcatccaaacgaaattgccttctcgaaaaagaataaaggctacgacgaagactattccggcgataagagcggtatcagtctttataaagccgcagcgaaatttaaatatggcccggtctgggcgcgcgccggttatattcagcctaccggtcagacgctgttagcgccgcactggagttttatgccgggtacctatcagggtgcggaagccggcgccagttttgactatggcgatgcgggcgcgttaagtttttcctacatgtggactaacgaatataaagcgccgtggcataccgaaatggataagttttatcaggcggataaaaaaaccaatgtggattatctccactccatcggcgcgaagtacgacttcaaaaatgatctggtgctggaagcggcgtttggtcagtccgaaggctatgtcgatcaatatttcgcgaaggccagctataaatttgatttaggcggcaatccgttcaccaccagttaccagttctacggcgcgcgcgacaaagtagacgatcgcagcgtgaatgatatttacgacggtacggcctggctgcaggcgttgaccttcggctacaaagtcgcggaagtggttgacctgcgtctggaaggcacctgggtgaaagcggacggtcagcagggctattttctgcaacgtatgacgccaacctacgcctcttcaaacggtcgtctggatatctggtgggataaccgctccgactttaacgctaacggtgaaaaggcggttttcttcggcgcgatgtatgacctgaaaaactggaatctgccgggctgggctgtgggtgcgtcttacgtttacgcctgggatgctaaaccggcaacctggcaaagtaacccggatgcttactacgacaaaaaccgcactatcgaagagtcctcatacagtctggatgcggtttataccctgcaggaggggcgtgccaaaggcaccatgttcaaactgcactttaccgaatatgacaaccactccaatattccaagctggggcggtggttacggcaacatcttccaggatgaacgtgacgtgaaatttatcgttattgcgccattcactattttctgatgtcagatgcggcaggctgccggcctgccgcgctgttgaggaacgacctatgaaaaaaattttactcatcgccagcatgaccgccggtttgacggcctgcgcgtcatcacccgcgccggaagaagatagccggctgaaagaggcgtacagcgcctgtatcaataccgcacagggctcgcctgagaagatagaggcctgccaaagcgtgctgaatgtccttaaaaaagagcgcagacatcagcaatttgctaacgaagaaagcgtgcgggtactggactatcagcagtgcattcaggcgacgcgcacgggtaacgatcaggcggtcaaggctgactgcgataaggtctggcaggaaattcgcagtcataataacgtgcaataaaaccctgccttgccacccacgggcgaatgttttccgcccgtggttttttcaggctttattttctgccgcgatatagccgcgactcagacgtacaaacagcatcgccgtcgcggcaagtccacataacgctgcgcacatcagccaccagccgggcgagcttttatcgccggttaactttaccagcgcggtagagatggccggcgtcaggccgccaaaaatcgccgtcgccaggctaaaggccagcgagaaaccaacggtacgcacatagactggcatcacttcggttaacgccgcgaccattgcgccgttatacatgccaaaaaagaaagagaaccacagcagtaccagcgtcatgcgggtaaagtcgggcgcggcggtcagccactgcatgacgggccaggtggtgatcagcgccagcaacgtaatgcccattaacacagcgcgacggccaatccggtcggaaatcgcgccgccaatgggtaaccagataaaattggacacccccactaacatggtgacgatcaaactgtcccgcgcgctgagattaagcacggttctgccataggtcggcgtataaacggtgataaaataaaacgttgtggtggtcatcgccaccagcagcgttccggctgtaataatgcgccagtttttggcgatagttgcaaaaatttccctggtgtcggggcgatgcttgcgttgtaaaaacgcttctgtttcttgtaatgaacgacgtaaaacaaaaatcagcggaatgatcatacagccgataaagaacggaattcgccagccccactccgatatcgcgtcgtgtcccagcgtgatattcaggctataaccaatcaacgcggcaacaacgatcgcgacctgctgactggcggattgccagctggtataaaaccctttattgcctggcgttgcgatttcggacagatagaccgagacgccgcctaactcaacgcccgcagaaaatccttgtaataaccggcccaacagcaccaacgcaggcgctgccaggccgatcgtttggtagccggggacgagggcgatgagcaacgtaccgcagcccataatcgccagtgtcaccatcagccctttacggcgtccgattctgtcaatataggcgccaagcacaatcgcgccgacggggcgcattaaaaaaccggagccaaagacggcaaaggtcaacattaatgaggcaaattcgctttccgccggaaaaaacgttctggcgatataggtggcgtaaaatccgaacaagaaaaaatcaaactgttcaaggaaattgccgcttgtcacgcgcagtattgcgccgaacgtgccggcgcgcgatgttgcaggtgtgtgttgtgccatagggtttgctctccactgtctttattgttttatgggtaagatgttgcgggtcagttgcctgtatcccccgcatgttttccgcgtcgcttctcaactgcccatttgagtaaggccgcgcagcggaaaaatccgtgggcgaattttccgtagggaagggtgagaaagagcgccatcaccacgcctaaatggagcgccagcagtatgcccattccgctggtgtctctgcctgccagcagcgccagcccggtcagactggttaagaacagcagcagaataaagccgcgatccatgggtttctggcgcgcatcgccatgtaacggcgaccgccgcagattgagccacagtagcccggccgggccgataagcagaccgataccgcccagcgtgccgagcatgaccggcaggctaaaaaacgggtagggcgcttcccaaccggcgacgtagtgatagcccgtcgccacgaccgtggcggcaaaacagagcataaaaccgtaaaaggtaaagtgatgaaagcgacggcgcagcagcgtgaacgcatcgtccgcttcgttacagcctttgccgtgaccgccgtcgagatatttcagcgttaacgcattgtgcgacgcttccgcaatctctgccgaacgcggtacgcccggcgagatctcacgccagaagcggattacgcccgccataagcaaaccgattgccagcacaaaaactgagccgaacatccatgccagcaggctatgcggaaaaatttgatagaagtcaccggccagcggcggatgaatcagcgaccctttcagcgccatcgccagtaataaaaagagcgtcagaccgactatcagcgccagcgcgacggtgatccccgcccgacggtataacgcgccaaaagcggcgggctgggcatactgttgatacgtctccaggcgggcttgcgccatcgctttcggcacgttaatggcaaattcatggggcggcgcgtactggcacgcgtgcaggcaggcgccgcagttatgacataaattcgccagataatgaatatcggctttaccgaattcgagccgctgggtcatcgccggaaataccgcgcaaaaaccttcgcagtagcgacacgcgttacacacttgcatgacgcgttcgacctcggcttccggttcggtaagcacggtggcctcaatgattaatttttcaagctgtttcatgctgcgcctccttgtgcgccgcgcgggcggcttctattcccgcaatgcggccaaaggttgtgccgatagacatgcctacgcctgcggtataccccttgcccagaacatttcctgccatcatctcgccggcaacaaacaggttgcggcttggatgaccggcaaaatgcaccgcggcacgttcattgactttcagacccaggtaggtaaacgtgatgccgggtcgcagcgcataaccgtagtagggcggcgcatcaagcgggcgcgcccagtgggttttcgccggcgtcaggtttttagtggcgcagtcatcaagcaaggtatgatcaaaatgaccgggctggcaggcctggttatactgcgtgacggtatgggtaaatttttccgcgtccagccccaactggcaggccagctcagccagcgtattggcctgcgcgccaggaaaaaccggcggcataaagtggccgatggctttgctgtcaataatcgaatagccaatttgtcctggctgttgagcaaccagccgcccccaaatggcgtaacgcttcggccagaaatcttcgccttcatcataaaaacgttcggcgtcgcgattcacgacaatacccagcgatacgcaatccacgcgagtacaaataccgccgtcgtacagcggcgccctggcatcaatcgctacgcagtgcgactgggacggatcgccaatgatatccgcgccggcatccatcataaatttgagtaatacgccctggttaaaacgcgtgccgcgaatcaggaaattatccgcgggccattcgccgcgggcgttttctccccaggcctcccgcagccattcacggtttgattcgaaaccgccagccgctaatacgcaggctttggcggtaatccgttcgctacccgccagcgccgccacgaattcgccgtcatgaagttcaagcgcgtgaaccggcgtgttatagcgaacctgtacgcccagccgttcggcgctacggtaataggcattgacgagcgctttcccgccgcccataaaaaacgcattggtgcgcgcaacgtggagcgccccagatagtggcggttgaaagttaacgccatgtttgcgcatccagtcgcggcattgcgaagaggtgcgaatgaccagccgcgccagcgcctcgttggtgttgccgtcggtgactcgccacagatcctgccagaattcctcttcaggatagctttctaccagcacatcctgcggcgcatcatgcatacagcgcaggtttcgtgtgtgctgagaatttccgccgcgccattcccgcggggcagcctccagcagcagaaccgatgcgcccgcttcccgtgcggtcagggcggcgcataatgcggcattgcctccgcctatcaccagtacatcaaccatcttatactcccgtaccatttaactatttgttaaatttgtaattgaaatgtatacggataaataagcggtgcgctatcaggtagcgctaaacaggggtttagtaagcgtaaagggttgcgcctggccattcaccggcgtcgactaactgacgcataactttggtaaggactactctggcggcaaggccggcgggcgtcagttcatcatccgacaggctgactaaaaaattggggcggctgagtaccggattatggacgccgatcacgcgtagcgcgtcgttatccagatgagaaatcgccgcgccgggctgcaacgtggcgccaagaccgtcgcgcacggcgcgcatcaacaacgccaggccgtcaatttccgcgacgatttcaacgttaagcgcatgttcctggcagacagcgtccagcctgccgcgcagcccatgtccctggcttggcataatgagcggaatgcctgccagttgttcaggtgtgatcgggttatcaggaagcgccgccagcagggcatgggagccaatcagaaaaagctgttcttcaaggatcggtctggcgctccagcgcaggattttatctttttgaaagacaatggctaaatcaatctggcgggtattgatcattctttccagattaccggacaagctttccaccacatgcagtcggacatcggcatagttttcctgcatggcatggataaacggtatacccagtatggaggcggtactgggggccattcctacgctcacatgaccggaaaggcgcgcttctctggcggcgagaatcgcgtcgtcggcatgacgcagggcgagttgcgcctgtgaataaaaggccagcccggcgttggttggcgttacgccgcgcgaagtgcgctgcagcagacggatggcgagctcgttttccagacgggacatctgttgacttaatgctgaaacgccaatatcaagatcctgtgcggcgctgcccatactgccggtttcaataatacgcacgaaatagcgtaactggcgaagctccattcctgctctcctgagatgcgatagcgttttttacattaaatcaacatcaagcggcaggaaagaggaggatataaaaaagccaaccgggcggttggctcttcgaaagatttacacttatttagtcgcgtcatcgtgcgcgtgctcgtcttcgcggcagtcgccttcagcgcagtggccgtaaagatagaggctgtgattagttaaacgaataccgtgtttcgccgcaatttcacgctggcgcgcttcaatagagtcatcactaaattcaatcacttttccgcaatcaaggcagataagatggtcgtgatgatgctgttgcgtcagttcaaaaacggatttaccgccttcaaaattatggcgggtcacgataccggcatcgtcaaactggttcagcacacggtatacggttgccagaccgatttcttcacccatgtcgatcaggcgtttgtataaatcttccgcactgacgtgatggttatctggttcctgaagaacttccagaatttttaaacgaggaagcgttactttcaggccagccttctttaatgcggtattgttgtcagtcatgcggaatctgtcctgttgctaaacgattcacttcattagagaagtgacagaaattgcactcaagataatgcgtatcattataggactgccatgccgaaatgaaaaccgcaagtctctcgcagatgttaataaaactgtggttttgcctgcaaattctggcgccacctgattacacccggacattgtacagggatgggtgcgaaagttacaaatttgtagcaattattttgattggtcttgtctattgatgcggcgcagatataacgctgcgccgcataagattaggcgttgaggatgtcgtcgaggtgcaattcagccgaaacttgcttaacccatttttcaacacgctcggcggtcagttcaggctgacggtcttcgtcaatcgccagaccgacaaaatgatcgtcgtcagccagacctttagaggcttcaaaatgatagcctgcggttggccagtgacccacaatcgtggcgccgcgcggctcaataatgtcgcgaatcgtgcccagcgcatcacagaagtattccgcgtagtcttcctgatcgccacagccaaacagcgccaccagcttaccgttaaagtcaatctcttcgagagtcgggaagaagtcatcccagtcacattgcgcttcgccataataccaggttgggatgcccagcagcagaatgtcatacccttccaggtcttctttactgctttttgcaatgtcatgcacatcggcaacgtctttaccaagctgtttttgaatcatttttgcgatattttcggtattaccggtgtcgctgccgaaaaagatgccagtgattgccatgagtaaaataacctcttgaaacttattgaaatggtggtggcgaattgcccacggataagggcaatcatagcagaacaggcagatatgcggaaacagcaatcacgcgggactgcacgctctgctacacgaaatatgaaacaaaacttattttcagactaaaccctggccgcgcagcgccataagctgcttcattaatatttcttcaatgagctcgctgcggctaatgttgcgcgcttcggccagctcattcagcgcgtcaaccgcttgtgcgttgagttttaattcgacacgcttgaggccacgaactttgtcgcgttttaactggttgcgcttgttgatgcgtaactgttcatcgcgcgaaagcggattcgttttaggtcgtcccgggcgacgctcgtgcgcgaacagatctaatgtcgtacggtccgtttgttctttggccatgattttggtgacttcgggggaaacaatcagccaggcttatgcccggatggatagcgcgccatcatacatcagcgaggaagcgacgccaacgcccgcgcgcgtaatcgcgcacaggcgatgagtttttaatcagttagcgtttatcgtgcagataacggcggatggcgcgcagaaccgcctctggtttttcggcatgtacccagtggcccgcgccggcgatcacatgcgcgcgcgccaaagggaattgtgccagtagcgtgtcgcggtacgcttcggtcacgtacggcgagttaccgcctggaataaacagcgccggatgttcccagggcggaatggtttcccagccgacgatatgcggatactgctcccataataccggaacattaaaacgccattcgccttcagcccaggattttaacagaaactggatcacgccttcttcgttgaggtgctggcgcataatccctgccgcctgttggcgggatgtcgcgtcggattcgctgacggcgttaatggccgcgaaaatgcgatcgtggcggcgaacgtgataatccacgggggcgatatcaatcgcgaccagacgatcgatgcgatcgggcgccagcgccgtcagcgccattaccgcttttccacccatggaatgaccaataaacgtcgctttttcaatctgctgcgcgtcaagcgtatccagaagatcctgggccattgccggataatccatgaccggatcgcgcggcgataaaccatgattgcgcatatcgacctgaataatgtcgtgatcggtcaccagatcgcgcgccagtacgccgaggttgtccaggctgccaaacaggccatgaacgagaacgatgggggaattattgtgcaggttttgtgcagattgcgctcggatgtttaatttcatggcaaagttctttttttcgctctgtcgggttagggtattatgttgaccattctgccactgggctgcaacctctaaggtttactccgagtttttttgtcagccgggcttaacgctatccgctgttgggatttgttcctataatcccaatgacttgtattcagcaaagacatcgcactggattaagatgaaaacgattgaagttgatgatgaactctatagctatattgccagccacaccaagcatatcggcgagagcgcatccgacattttacggcgtatgttgaagttttccgccacgacacagccaacggcttcagcggtgaaggggacgcctgcggcgcaacccgttgccgaagcgaaaccggttaacccggtaaaagacaaagttcgcgcgatgcgtgagctgttgttgtctgacgaatatgccgagcagaaaaaagcggtcaaccgctttatgctgattctgactacactctattcactggatcaccacgcgtttgcggaggcgacggagtcgttgcatggccgcacgcgcgtctattttgcggcggatgaacaaacgctgctgaaaaatgggaatcaaactaaacctaagcacgttcccggcacgccgtactgggtgatcaccaacaccaacaccggccgtaaatgcagcatgatcgaacacatcatgcagtcaatgcaattcccggcggaattgattgaaaaggtttgcggaacaatttaatccttgcattagaaggaccaggcaatggcaatccacaaccgcgcaggacaacccgcgcaacagagtgatttgattaacgtcgcccaactgacggcgcagtattatgtactgaaaccggaggcagggaatgcagaacatgccgtgaaatttggcacttccggccatcgcggcagcgcaggtcgtcacagtttcaacgaaccgcatattctggcgatcgcccaggcgattgctgaagagcgggcgaaaaatggcattaccggcccctgctatgtggggaaagacacccatgcgctctcggaaccggccttcatttccgtgctggaagtgctggcggcaaacggcgtagacgttatcgtgcaggaaaataatggctttacgccaacgcctgccgtgtcaaatgctatcctggtccataacaaaaaaggcggcccgctggctgatggtattgtcattacgccgtcgcacaacccgccggaagatggcggtattaaatataatccgcccaatggcggcccggcggataccaacgtcactaaagtggtagaagatcgcgccaatgcgctgctggcgggcggcctgcaaggcgttaagcgcatctctctggatgcggcaatggcctcgggccacgttaaagcggtagatctggtacagccgtttgtcgaagggctggcggatatcgttgatatggcggcgattcagaaagccggtctgacgctgggtgtcgatccgctgggcggctccggtattgaatactggaaacgtatcgctgagcattacaaacttaacctgacgttagttaacgatcaggttgatcaaaccttccgctttatgcaccttgataaagacggcgcgatccgtatggattgctcctccgaatgtgcgatggcgggtttgctggcgctgcgtgacaagtttgacctggccttcgccaacgacccggactacgaccgtcatggcatcgtgacgcctgcagggctgatgaacccgaaccattatctggcggtcgccattaactatctgttccagcatcgtccgctatggggcaaagacgtggctgtcggtaaaacgctggtctcttccgcgatgattgaccgcgtggtgaatgatttgggacgcaagctggtagaagtgccggttggcttcaaatggtttgttgacggtttgttcgacggcagctttggtttcggcggggaagagagcgcgggcgcttcgttcctgcgtttcgacggtacgccgtggtctaccgataaagacggtatcatcatgtgcctgctggcggcggaaatcaccgccgttaccgggaaaaacccgcaagagcattacaatgaactggcagcgcgttttggcgccccgagctataaccgtctgcaggcgagcgcgacctccgcgcagaaagcggcattgtctaaactgtctccggaaatggtgagcgccagcacgctggcaggcgacccgatcaccgcgcgtcttaccgcagcgccgggtaatggcgcatcgattggcggcctgaaggtaatgaccgataacggctggttcgccgcgcgtccatccggtacggaagacgcttacaagatctattgcgaaagcttcctgggggaagaacatcgcaagcagattgagaaagaagccgttgaaatcgttagcgaagtattgaaaaacgcctgatgggcgatatggaagaaaaaggagccttacggctccttttttgtattaacggcgctgcgcttatcaggcctgtaaaccgcctccaggccggataaggcgcttgtgatatctgacttattcgctctgagtcgccagatgtcggcggcaggtgagggcgtcgcattcgatacgcaccacgcaaaccgctttcatcatatcttcccgataactgaaggtttttcccggatcggtctgacgcataatgacgtccaggccgtagcgcatctcctcgcgcgtttgcaatatcgatgccagtccggtggcgaaaacgctggtgtaggcgtagctataatcacaggggtcatcggcacgtagtaatgcatggtcgccgtccatttcaatgcatactgccgggttcttacgtaacagacgcatctttttcccggtgcgtgcgccgtgaaaataaaatatccagcgtccgttctgatactcgtagccaaaatttacggggacaacatacgggcagagattgtcgttaaaccctatccgacacacttcgtgtttactgagaatagccagtatttctgctatatcagtgacttcccgctctggattactcatttctattatcttattcaaagagtgaaaatgcccggactaccgttaccgcagcccgggcgcgccatcagccgtgtttatttttcaattcaaaacgcggtgagaccaggccgtataacgtccagccgaggaaggtcacaattgagccgtacagcatggcttcttcaccggaggaatagagcgcgtagaagctatacatggcgccaacgaaggccacgaagttagcgactttcgcttttgatgacggcacattcgccattttctgaatgataaccagcgcggccatcgacagaatatacggaataatgttcgtcaccaccgccaggttaaccaggacgttaaactgactattcagcgacgggctaatggtcatcagcgacaggccagtctgaataatcacaatgatcaacatcccctgaaccggcgcgtcgactttcgttacacgagagaagactttcgggaaatagccttcgtcagcggaggatttaaagacctgagcgatagtgaactgccagcccagcagcgagccgcagcaggacattaccatcagcgccatgatcactttacctaccgcaggcgtgaacatctgtgcaaacgccagaccaaacggcgccgtggagttcgccagatccatgttcggcacaatcccggcaatcacgttagtcgaaacgatatagatgaccgccgcgcccagcgtaccgcccagtaccgcaatggggacgttcttttccggattctcgaccacgtctgcgttggcgcaggcggattccagtccaagaaatgcccataacgtcatggcgatggaagaaccgaccgcgctaaagaacggaacatggtgcgggttccatgacgctacgtacatgctggggctaaaccagaaccagccaatgatgcacaggccgacaaccggaatgatgacgccccaaacggtaacgctactgatctgtccggtaatacgcgcgccgccaaagtttgcgatggtacaaacccacaatacggcgatagtcgccagaccgatctggagcggcgtcagcgcggcgccgaacagttcggtaccatagccgacagcggagatggcgatagccacgttggcgatcagcagcgagacgccgtaggtatagttcgccataaagttgccggatttaccgaaggcatattcggcgtaaccgcccatgccgccggatttacggctaaacataccgcatttcgcaaacgcccaggccagtgccatcgagccgacggcggtgaccagccaggagataatggatatcgtgccgacttcagacagtttggtcggtagcatgatgatcccggagcccatcatgttgaccatagtcagaattgtgagctgcacgacacccattttattggatttaggtttactcataatttttcctccttcagcagggagcgctgtgcgtcacgaggtttaatgacgtagcaccagacctgcttacggccgtcgtgttcttcgatataaacgccctgcagttcaggcgcaaagcccggcagcaggttgatcccttcttccagggcgctgaagtaacgcaggacagaaccgccccagatttcacccggaactacacacagcactcccggcgggtaaggcagagcgccttcagccgcgatacgaccttccgcttccggcaggcgaaccagttcgacctcgccgcgcagataggcatagttggcctcttgcggattcatactgactttcgggaaatgcgatttacggaacatctctttttgcagctgtttcacgttgtgccgcgcatagagatcgtgcatctcctggcaaagctgacgcagggtatagccggcataacgcgcttcatgctgtttgtagatggacggtaatacttccgctaacggcgcatcagcttccagcagtttttcgaaacgagccagcagggcgacaagctgttgtaacttcgccatgtcttctgccggcgtcagcaggaacagaatggagttgaggtcgcatttttccggcacaacgccgttctcgcgcaggaagttggcgaggatcgtggcaggaacgccaaagtcttcatattcgccgctcgctgcattaatgcccggtgtggtgagcagcagtttgcaagggtcgacaaagtactgatgttcggcatagccttcaaacgcatgccagtgttctcccggaacgaagtggaagaagcgcagatcgctggcgatctctgacgtcgggtatgactgccacggcttaccatcaatcagttccggtacgaacggacggatgtgatgacagttttcgaggatcaatttacgggcatcgatgccgttaaccacgcaatccatccacatattgcgaccgctgacgccttcgtgcattttggcgttaacgtccagcgcggcgaacagcggatagaacgggctggtggaggcgtgcatcataaaggcgttgttcatgcgcttatgcggaacgtagcgcgattgccctttgatatggctatcttttttatggatctgcgaggtctgggagaaaccggcttgttgtttgtgaacggactgcgtcaccagaatacccggatcgttttcgttcagttccagcagcagcggcgaacaatcggccatcatcggaataaattgttcatagccgacccaggcggagtcaaacaggatgtagtcgcacagatgaccaattttatcgacgacctgacgggcgttataaatggtaccgtcgtaggtgcctaactggatgacggccagacggaatggacgtgcttcgcgggcacgctgcggcgcgacttcgctaatcagctcgcgcaggtaatcttcttcgaagcagtgagcgtcgatcccgccgataaaaccatacgggttacgcgcggtttccagataaactggcgttgcgcccgcctgcaataatgcgccgtggtggttagatttgtggttgttacggtcaaacagtaccagatcgcccggcgttaacagcgcgttgagtacgactttgttagaggaggaggtcccgttcagcacaaagtaggtcttatcggcgttaaagactttcgccgcatgttgctgcgcaatgcaaggcgcgccttcgtgaatcagcagatcgcccatcgccacgtccgcgttgcataggtcggagcggaagagcgtttcgccaaagtattccacgaactgattaccggcaggatgacggcggaagaattcgccgccctgatgccccgggcagtcaaatgcgctgttgccctggttgacataatccaccagcgcgcggaaaaacggcggacgtaactgcgtttcgtagtggcttgctgcggtttccaactggcgaccatagaaggcagtacgggattcattatattcgaatacaccagagatacgcggcaaatactcaggcggtacgcgcccttcgtcatgtgtcgcgacaaacacgggaataccgtaacccgttgcgtcgatttcatcgagttttccgtgttcaatgtcgtcaatggataacacgatggcagccacgtcgatgaaacgactctcatcaacatttacaatattacggtgtgtagaaaaacaatccgggcaatgacggctaacggcaatttttaattctgacatttttcatctctttatttcaggtaatagcaggccctcaatttctcgcatgagaaactgattcttccggaaaaaatcaaagctatcccgctgataaaaaaatcagtaaattagctttattttagatgtaataaatcccaacccgtccggttgcaggaaattcaggatttaaggagttgagtactacgatatacaggcagaaaccgcgataactaaaattgcgctgagtcggaatttcttctgtcaaaccacatggttagctggctgggcgtaaaggaattaccgtactgtcgcttttaacaattcgagttatttaggcaatagacctgaatgacataagggtcggaaagacctgtatgctgaagtacccgtagcagaaaaactaccgggcattaaagaaatgaaagtcgaaactattgcggtgggcaaacatcataatatgcgttgtccgccttatatggggcataaaacgattattattttccattttgaggtcctttcattgatttattgaaagcatggatattttatccaggaagcgccagcaatctgtgaaccagatcaacaaaaaacgatcatttgaaaaataattagtcggcgattatgcatatcgtgctgtgaaataacggattgtttcttaaatgttagttatatgttttttatatcctctataaaatataatatcgccgcgaaaataattattcgcgacgccgaaaataaatgacataaaaattagaagttatttaaaaataatgaatagctattcacggcataaagcgatagccaattccggtttcggtaataaaatggcgtgggcgggtgggatcttgttccagtttctggcgtaaatgtcccatatagatgcgcaaatagtggctatgctccacggcgttaggcccccagacctggtttaataactgccgttgggttaatactttgccggtattattgagtaataccgccagcaggcggaactcaatcggcgtcagatggatttcttcgtcgccacggtggatcaaccgtgcggcgagatcgaccgtcacgccggaaaagcggacgatcggatcggcgcaagggctggcggcgtgccgtcgcagcgcgacacgcaaacgcgcctgcagctcgccaatgccgaatggcttgctcaggtaatcatcagctccggcgtcaagcgcggcaatcttatcgctttcttcgctgcgggcggaaaggacaatcaccggtattgcgctccattgacgcaggtcgcgaataaaatcgattccgtcgccgtccggcaggccgagatcgagaataatcagatcgggctttcgcgtggcggcttccagtaaaccacgttgtaatgtttcagcttcatacacgcgcaggccgtcgccttccagcgcggcgcgcagaaagcggcggatggcctgttcatcttcaacaatcagaacgtttgtcacatatcctcatgaaaatcatcaagttcaggtggctttccttgcggcagcgtcacacggaaacaggcgccgccctgcggtcgattataggcggtaagcgtgccgccgtgtacctctacgatagcatggcaaatcgccagccccagccccacgccggggacggcggactctttgttgccgcgggcgaacttatcgaaaatcttctgttcttgccccgcaggaatacccggcccgttatcccagacatccagttgtaaacgatcgtccttaaccgcagcatcaatgccgatactggcctgcggcccggcgtacttaacggcgttttccagcaagttgatcaggacgcgctcaaataaggggccatcgacatggataagcgttaactgttgcggcagcgacaatgtaatcggatgcaataaacccggctctaacatctgtaacgcgctaccgacgacctcttccagcgtcagccactcttttttaagattaaacccgccggactgaatacgcgccatatccagcaaattattcaccagccgggtggtgttgagaatatgctggcggatttcactggcctgacgcgcgtggggcgatcctgcgctggctaaatccagcgtcaaaatttccgcctggccgaacaataccgtcagcggcgtgcgtaaatcatgcgacagcgccgccagcagagcgttgcgaatactttcgcgctcgctggcgagacgcgcctgttcttcgctggcggtcagcgtcagtcgttccagcgcgttggcgacaagcagagtaaatgtttccagcaggcgttgctgctccggcaccattaactgacgcaaattacccggttcgacgatagccagaccgtacgttttatcggcgcttttcagcggcaggatttgataaggcacgccagggagggtatcggtgcctgcgccggcaggctggcctttatcaaaactccagcgcgcaattgcgtcgtcccacggcgtcatgccttgctggtgggtgagaggcagcaacttaccgttagcatcaggtaacaaaatttggctgcgcgcctggaacgtcgaggcgataaaccgctcgctggtcgcggcgatatcatgttcgctacgcccgacggccagcgctttagacatttcatataaatggcgggtacgctgttcccgataacgggcgacgcgcgcctgatagcgcaccccggcagtaagattgccaatcaccagaccaaccgtcagcatcacggcaaaggtcagcaaatactgcacgtccgaaacggcgagcgtaccgcgtggcgcgataaaaaagagatcgaaactcgccacgttaatcaccgtcgccaccaccgacggccagcgtccgtaaagcagcgcaatcaccactacgcccagcaaatagagcattaccagattggcggcgtcgaaggtgacaagccactgcatagcgataagcgtggtgatggcgcaaagcgccacggcgaccagacagccctgaatctgcccacgccatttctctttaaaaggtcggttatcaggcgtttgcgccaatgcgcgggctggcggctcttccagcgcgacgatcacctgatcgagatccggcgcgcgcctggcaagacggtcggcgaaagcgtcacgtcgccaccagcgtcgcgacgccgggcggcccatgacgattttccccagattatgctcgcgggcatagcgcacgaccgctttctcttcggcgggatcggacagggtggcggtttccgcgccaagctcctgcgccaggcgcagcgcgcttaaaatagcccgccgttgcttttccggtaagcggtgtaacgttggcgtttcgacatagacggcgtgccagacgctgccaagccgggaggccagacgcgccgcggtacgcaccagtttttcgctgccggtgttatgcccgatacacagcaaaatcgcatcgcgggtatgccatactttttcttcgcccggatgcgcgcgccaggcgcgcatctgatcgtccacgcgatcggctgtccggcgtaacgccagctcgcggagggcgatcagattgcccttgcggaaaaaatgttcaatagcgcgttccgcctggccggcgatatacactttaccttcgttgagccgttggcgcagatcgtcgggcggcagatcgaccagtacgacttcatcagcggcatcaaaaaagggatcggggacggtttcgcgcacctgaattcccgtgacgccgctcaccacatcattcagactttccagatgttgtacgttcacggtggtgaaaacgtcgattcccgcttccagcagctcttcaatatcctgccagcgcttaggatggcgtgagccaggcgcgttactgtgcgccagctcatccattaaaatcagcgccggacgccgggcgagggcggcatccaggtcaaattcgcggatttgccgcccccggtgcgagtgacgttttggcggcagaatggtcagcccgtcaagtagtgcggcggtctctttacggccatgcgtctctaccacgccgatcaccacatccagcccctgcgctcgcagccgctgcgcttgcgccagcatcgcccaggtttttccgacacctgcgcaggcgccgaagaaaattttcaacttcccccggtggggcgggggcgtttgttccaacaagcgatccggatcaggacgcaagggttcgtcgttcatttcgctctgtgtccctgtagcgcatccagcgccagattaagctcaacaatattcaccaccggttgcccaagaaagcgcgccagcggcctgtgcgtatattctgcaaccagttgcgcgacctgttcaacgggaagctggcgagccgccgctacgcgggggatttgccatgccgcggcgccgggcgtcagattattatccagcccgcttgccgaggccgtcgccagctcaaccggaaccgcggaactcgcctgggggttagcggcgcgtagcgcggcgacgcgggcctgtatttgcgcatccagttcgggattgctggcggccaggttgcttccgcccgacgccagtggattataaggcgtatcggcggtggcggagggccggccatgaaaatagcccgcggcggtaaacgattgtccgataagcgctgagccgcgtatcacattgtctttatgaatcagcgagccattagcctgccagggaaaccaccactgccccagcgccgtggtcagaagcggatacacgccgccagtcaataacagcagaaataacattgtcgaaaaagcaggacgtaaaccgatcatcatacacctcacgccagacccagcagggtcagcagcacatcaatcactttgataccaataaacggcaccaccagaccacccagaccatagatccataaattacggcgcagcatggccgatgcggaaagcggcttataactcacgccttttaatgccagcgggatcagaaaaataataatcagggcgttaaagatcaccgcgctcagaatggcggagttcggcgaatgcagccccatcacgttgagcgcgtttagctgcggataggtagcggcaaacgcggcgggaataatggcgaaatatttcgctacatcattcgcgatactgaaggtggtgagcgagccgcgcgtcatcagcatctgcttaccgatatgcaccacttcaatcaacttggtcgggttagagtccagatccaccatattaccggcttctttcgccgcctgggtgccggagttcatcgccaccgcgacgtcagcctgcgccagcgccggggcatcgttagtgccgtcgccggtcatggcgaccagccgtccttccgcctgatattgacggatcagcgccagcttggcttccggcgtggcttcggcaagaaaatcgtccacaccggcttcggcggcaatcgctgccgccgtcaggcggttatcgccagtgatcatcaccgttttaatacccatctttcgcagctgggcgaaacgttctttaataccgcctttaacgatatccttgagggcgataacacccagtacgtgcgcgccctccacgaccaccagcggcgtcgcgcccaggcgcgccacgttctcgacgttttgctcgacatcggcgggaaaatggccgccattgctctcgacatgacgccgaatcgcgtccaccgagcctttacggatcatccggttatcgatattaatcccgctcatgcggctttgtgcggtaaacggaacaaaggtggcatgaagcgactgcacatcgcgttcacgcaggttaaagcgctgtttggcgaggatcacaatgctgcgaccttccggcgtttcgtcggccagcgaagcgagctgcgcggcgtcagccagcgtgcgttcgtccacccctcgggcgggaataaaatcggacgcctggcggttgccgagcgtgatagtgccggttttatccagcagcagcacgtcgacatcgcccgcggcttctacggcgcggccgctggtggcgatgacgttcgcgcccaacattcggctcattccggctacgccaatggcggagagtagcccgccgatggtggtggggatcaggcacaccagcaacgccaccaacacggtgacgctgaccgcgttaccgccccaggcggagaagggccacagggtggcggtcgccaataaaaagacaatggtcagggcgatgagcaaaatcgtcagggcaatctcgttaggcgttttccgccgctgcgcgccttccaccatcgcgatcatccggtcaagaaaggtttcgccaggattgacgctacaggcaatcaccagccagtcggaaagaattcgcgtgccgccggtgacagaggcgaaatcgccgccggactcgcggatcacgggcgcggattcgccggtaatcgcactttcatccaccgaggcgccgccttcgatgacctcgccgtcgcagggaataatatcgcccgctttgaccaggacaatgtcgcctttccgcagttcagcggcgggcacgttatcggcctgcgcatcatggcgaggggcgcgcaggcggcgagcgaacgcggtctttttcacccctttcagactgtttgcctgggctttgctgcggccttccgccagcgcttcggcaaaattggcgaacagtacggtgaaccataaccacaggctgataatccctgtaaacaaggcgcttcccgctatttgtcctgttaccatagcgagcgttaacagagtggttagcacgctgccggcccagaccacaaacatcaccgggttacgccactgggcgcgtgggcttaatttttttacggcatccgttagcgcctgtacgagtaaaacaggttcaaacagcgccagttgcttgcgactcatatcaatgtactccacatcgctcaaggtaaagagaaatgctccgctaccgggccaagcgccagggcaggaataaatgtcagcgcgccgaccagcagtaccgtgccgatgagcagtccaataaatagcgcgccgtgggtcgccagcgttccctgactggccggctgtacttttttactgaccagcgagccggcgatggccatgacaggaataatcacgccgaaacgtccgacgaacatgcagaatgccagcaaacagttccagaaaggcgagttagcgctcagacccgcaaaggcgctaccgttgttgttggcggcagaggagacggcatatagcacttcgctaaaaccgtgcgggccagggttcagcattgcgctgcgtccggcatccgtcatcatcgccagcgccgaacccaacaagaccagcatcggcgtgaccagaatcgccagcgcggtcattttcatttcgcgcacgtcgatttttttccccagatattccggcgtgcgaccgatcatcagccccgcgataaacaccgccagcaggacaaacagcaacatgccatacaggcctgaaccgacgccgccaaagaccacttcgccaatttgcatcagccacatcggcaccataccgcccagagcggtaaacgagtcgtgcatggcatttaccgccccgcaggacgccgcggtcgtgacgacggcaaacaggctgctggccagcacgccaaagcgtgtttctttaccctccatgttgacgctactgtccgcgcctgccgccaacagatgtggatttccctgaacttccgcccacatcactaccgctacgcagaccacaaaaatgaatgacattgcccacagtagcgcgcgtccctgacagcgatcgcccgccgcttcgccaaaggcgaaacagagcgcggctggaatcaaaaatatcgccagcatctgcgccagattagtgagcgcggtggggttttcgaacggatgcgaagagttggcgttaaagaaaccgccgccgttggtgccaagcattttgatcgcctcctgcgaagcaaccggccccatcggcaagagttgtttagcgccttcaagggtggtgatgggctgataagccgacaggttttgcggtacgccttgttggataaaaaacagcgcgataattaacgcgacaggaaataatatccatagcgtaatgcgtaccagatcctgccaggcattacccagcgtgtgcacattctggcgcgtaaaggcgcggataagcgcaaaaaccaccgcaatcccggtcgccgccgacaggaaattttgcaccgtcagcccggccatctggctaaagtagctcagcgtgctttcgccgctgtaggcttgccagttggtattggtgacaaagctgacggcggtattcagcgccagatccccggacagccccggtagccgctgcggatttaagggcagccactcctgccagaacaacaggcaaaacaggatgcccagtcccagcagattgagcgtcagtagcgccagtaaatactgacgccagttcatttcgtggtcggtaatgccaagagtccgccagaggatacgctcaatgccagccacgcccggcaacggaacggcggcgatgagccttgccaggcccgaacccaatggtttcgccagtaccaataaaatcagtaaaaaactggcgatcagtaaaaatccttgcgcggccatcagaacgcctccgcattaatcagggcatagaccagataacctaaaagtaagaaaaccagcacgatgccggttatcacgcctgcactcacagagcacctccagtggcattgttttactcctgagaaaggtaattttttggctgcaaagatttcgcaaaaattggcgggcggagtgtaaaaaaagtataaaaatggcaaagaccattatttaactaatgattagtattaatttaacctttttgtaactaatttacgctttgaatgtaaatctgctggaaaagcgtgaaaataagtggtcggatgagtagtaaaattacaccgaaagcggtactattttaatcaggtaacgaggttcaatttttcggtgctattcaccgattcaatctataccggggcgggtagcgtcggtataaaggggggaaacgtatggaacactataaagactatccagcgcatgtcatttttgtccgtcgtgctttcgcggtgatcgcaggcgtgctggcgctgccggtgatgctcttctggaaagaccgcgcgcgtttttatagttatctgcaccgtgtctggtcgaaaaccagtgataaaccggtatggatggcgcaggctgaaaaagccacctgcgacttttattaatcgcgaccagcctgaaaaaccgtcagccgccacgctggcggtttttttatgcgccagggtctacactgtttaacgctattcgccgtgacgtttcatctttcaggagttgtatgcccacccatttagtctggttcaggcgcgatctgcgtttacaggataaccttgcgctggccgccgcctgccgcgatgcatccgcgcgggtgctggcgctttatatttccacccccgcgcagtggcaggcccatgatatggcgccgcggcaggcggcattcatcagcgcgcagctcaatgcgctacagacggcccttgcagagaaaggcattccgttgctgtttcatgaagtggcggattttaacgccagtattgaaacggtcaaaaacgtttgccgacagcatgacgtcagccatctgttttataactatcagtatgagtttaacgagcgtcagcgtgatgcggcggtggaaaaaacgctgccctctgtcatctgcgaaggctttgacgatagcgtgattctggcgcccggcgcggtgatgaccggcaatcatgaaatgtataaagtttttacgccgtttaaaaatgcctggttgaaacggctaaaagaagatatcccgccgtgcgttccggccccgaagatccgggtgagcggcgcgctttctacacccttaacgccagtctcgcttaactacccgcaacaggcgtttgacgccgcgcttttcccggtggaagaaaacgcggtcatcgcgcagctacgtcagttttgcgcgcagggcgcagacgagtatgcgttacggcgcgatttccctgcggttgacggcaccagtcggctttccgccagcctggcgacgggcggcctgtcgccgcgacagtgcctgcaccgattactggcggagcagccgcaggcgctggacggcgggccgggaagcgtctggttgaatgagctcatctggcgggaattttaccgtcatttaatgacctggtatccggcattatgcaaacaccagccgtttatccgctggacaaaacgcgtcgcgtggcaggaaaacccgcactattttcaggcatggcagaaaggcgaaaccggttatcccattgtcgatgcggcgatgcgccagcttaacgcgacgggctggatgcataaccgtttacgcatgattaccgccagctttctggtaaaagatctgttgattgactggcggttgggggagcgctatttcatgtcgcagcttattgacggcgatcttgccgccaataatggcggctggcagtgggccgcctcaaccggtactgacgccgcgccttattttcgtatttttaatcccacgactcagggagagaggttcgatcgcgacggcgaatttatccgccagtggctaccggcattacgcgatatccctggaaaagcgattcacgagccgtggcggtgggcggaaaaagcgggagtcgtgcttgattatcctcggcctattgtggagcacaaacaggcgagaatcgcaacgctttccgcctatgaggcggcgagaaaaggggcgtgatacaggcccggtagcgcaaactaccgggcattctgctatcaggattcgacggccagcgcgcggcttttgaatttgaaggactgatacagccaaatcagcaggacaacccctacgcaggctaacgcgccccaggtgatctgttcaaaaacatccacataggcgttgatggcgtaattaaccgcgccgctggcgtcgaaggcgctttgcgaggtctggtcagcgatgacgcctgccagatagttagctatcgcgccggacagcagcatataaattccggttaatacgccggtgacgccggggatatcaatgcgcgtaatttgcgacatggcgaccgggtcgataaatagctcggcaaagcccatcaccgccagtcccagcaccattagcggcattgaagagtgtccgtaagcggcggaccagcgtgcgctcagggtcagaatacagaatccggcgctcatcagaccgagacccagcgcgaatttgccccagatacgcacggtgcgattaccgcttacgctctctttaaccagccaggccaggacgaccccacacagcatcacggcaaaggcgttcaccgactggaacatggcggtaggaacggaatagcccagaatatcgcggttcacaaagcggtcgatatacaggctgatagaactgccgccctgctgggcaaacgcccagaacagcatactgaacagggtcagggtgacaatcagccccagttctttgcgctgtttggccgtttgcgcctggcgataaatttttgccagcacgaccaggccgatcgcggtcgccacgattaaggcatagacagaccattctttccagaacagaacggtaatcagcaacggcgccgctaccagcaaaattaacagccagccccagttcggcagcaggtagtttctggcgcacaacacggctttattcacgccggtggtgtgggtgaaatgacgatttccacacaggaagatcactaaccccgcaagcataccaatggcggcgagcgcaaagcccatcgcccaactgtactcctcttgcacatagccgcaggcgataggcgccacgatcgaaccaatattgcccgctgcgtaaagcagcgagaacccgccgtcgcggcgcggatcttccggctggtacagttcgcccagcaggcagctaatattcgatttaaacaggccgtagccgcagacaatgatcgccagcgacagataaaggaatgtcggcgcgatctcactggcgcccagcactaaatgacctatagccattaaaaatgcgcccagcatgactgccattcggttgccaagcaccttatccgccagatagccgccaagaatcggcgttacgtagaccagcgaacaataagcgctgaataactcataggcgtggttatcgtcgtattttagctgattggtgagataaagaatcagtagggcgcgcataccataaaagctgaagtactcccaaatttgcagggcgacaacgtagtaaatagcgcggggttgagatgcttgtttattcatcgtatttccgggatagaggcactgcggcaagaacgcggcattctcagataatgcctttctttgtgggcttattaagcctgccgtatcgccgtgtttccttaaagttaccaacatgatacagaactgattttttctgcaatatgcgttctgattgcataaatatacatgaaaccgatcgtgttttgctaagtaatttgcgccaaacccggaggtgattgtttcttgatgtgtcaaacaaatgtttatcgacgaacggctaacggaaggctatgttaacggagactgaacccgtaacgggaaagtagaacgtgggttaaagggagcgatgatgaaaaacaccgagctggaacaactgattaacgacaagctgaacagtgcggcaataagcgattatgcgccgaatggtttacaggtcgaaggaaaagagacggtacagaaaatcgttaccggcgtgaccgcaagtcaggcgctgctcgatgaggcggtgcgtttgcaggccgatgcggtcattgttcatcatggttacttctggaaaggcgagtctccggttattcgcggcatgaaacgccgtcgcttaaaaacgttactggcaaatgatattaacctttacggttggcatctgccgctggatgcgcaccctgagctgggcaacaatgcgcagttggcggcgctattgggcattaccgtgaaaggagaaattgagccgctggtgccgtggggagagctctcaatgccggtgccagggctggaactggcctcatggattgaagcgcgtctggggcgtaaaccgctatggtgcggcgataccgggccagagaatgtgcagcgtgtcgcctggtgtaccggcggcgggcaaagttttattgatagcgccgcccgcttcggcgtggatgctttcattaccggcgaggtgtctgaacagaccattcattccgcgcgcgaacaggggctgcatttttatgccgccgggcaccatgccactgaacgcggcggtattcgcgccctgagcgaatggttgaacgaaaacacggcgttggatgtgacgtttattgatatccctaacccggcataactgagaggcaataaagtgcagcgagcgcgttgttatctgttaggcgaaacggcggtcgtcctggaacttgaaccgccgattacgctggcgagccagaaacgcatctggcgtctgacgcagcgtctggtcgatatgccgaacgtggtggaagccattcccgggatgaacaatatcaccgtgatcttgcgggaaccgcaaaccctggcgctggatgcgattgagcgtctgcagcgctggtgggaagagagcgaggcgctggaaccggactcgcgttcggttgagatcccggtgatctatggcggcgcaggcgggccggatctggcggcggtggcacggcacagcggtttgagtgaaaagcaggtcgtggagctacatgcctccgttgagtatgtcgtctggtttttaggctttcagcctggctttccctatcttgggaatttaccagaaccgctccatatgcccagacgcgcggagccgcgcctgcaggttccggccggttctgtcggcatcggcggcgcgcagacggggatttatccattatccacgccgggcggctggcagctgatcggcctcacgccgttgaagttattcgatccgatgcgggagaccccggttctgctacgccctggcgatagcgtacgctttgtgccgcaaaaggagggaatatgctgaatattattcgcgcggggatttatacctccgtgcaggatagcgggcgtcacggctttcgtcagtcggggctgagtcactgcggtgcgctggataaacccgcctttcagaccgctaatctcctggtcgggaacgatgcgaatgccccggcgctggaaatcactctcggtcaactggttgtcgaatttgaaaatgagacctggttcgctcttaccggcgcaggctgcgaggcgcagttggatgatcaaccggtctggaccggctggcgattgccggtaaaagcgggtcagcgtcttacgctgcatcgaccgcttcacgggatgcgtagctatctggcggtggcgggcggtattgctgtgccggaggtgatgggatcgtatagtaccgatctgaagtccggcatcggtgggctggaaggacggctgctaaaagatggcgatcggctggcgacgggtaaaccatcgcgacagtttagcgggccgcagggcgtgaagcagttactgtgggggaatcgcatccgtgcgctaccggggccggaataccgtgagttcgatcgcgcctcgcaagaagcgttctggcgttcgccgtggcagctcagtccgcaaagtaatcgcatgggctatcgtttgcagggacaatcgttaacgcggacaacggatcgcgaactgctgtcgcacggtttgctgcccggtgtcgtgcaggtgccttacaacggccaacctattgtgttaatgaatgatgcccagacaactggcggctatccgcgcattgcctgcatcatcgaggcagatatgtaccatctggcgcagatccctctaggacaaccgatccattttgtgcaatgttcgctggaggaggcgctcaacgcgcgccgcgagcgtcagcgctatctggaacagcttacctggcgacttcagcatgaacattgatttaaatgcggatttgggcgaaggttgcgccagcgacagcgaattattaacgctggtctcctccgccaatatcgcctgtggttttcacgccggtgatgcgcaaaccatgctgacctgcgtgcgcgaggcgctgaaaaacggcgtggcgatcggcgcgcatcccagctttccggatcgggataattttgggcggacggcgatggttttgccgccggaaacggtatacgcccagacgctgtaccaaatcggcgcgctgggggcgattgtccaggcgcaaggcggcgtgatgcgccatgtcaaaccgcacggtatgctctataaccaggcggcgaaagatcctcatctggcacaggcgattgcgaaagcggtacacgactatgatccgtcactgatactggttggactggcgggaagtgagctgatccgggccggtgagcgccatcgcctggtgacgcggcaggaggtgtttgccgatcgcggctatcaggccgacggtagcctggtgccgcgcatgcaacctggcgcgctgattcacgacgaagagcaggcgctggcgcaaacgctggatatggtacaagccgggagagtgaaaagcgttactggcgtgtggacgactgtcacggcgcaaacggtgtgcattcatggcgacggcgagtatgcgcttgcattcgctcgcaggttacgcgccgcgttcaatgcgcgtaatatacacgttattgcctgagagcccgacgattgaagctattatattacggctgctaaaaattatcgtgttctgttctcttaatgtcaggaagagggatttattcaatactatataaatccccttataatatattattttaaaaataaccaagtgatgctgtaatagccagtatgatgagcttattgctgttagcagcagagtttttgaaaatcattatgatattgttagctatcgccatctaatcaaacctccggggcgggtaaactacctgactctttattacccctttctgattgatttacctcacgatagcctcatttttagcatttatattcctcatcatgacgacttatcaggagattgaagccagattgattcgctgtttcactatcacgtcatggatagcgtgccagattgccagctatatggattttaagctgtttacgcatagcaacttttttagcgaaaattaaactcatctgatcagtgattttttagtatattactcattttgttatgatggatttgttttgtgaaaagaaaatatcttacgcaagaagagattgaaaaactgctgtcagcgaccgacagaatgcccttcccggaaagaaaccgctgcttaatcctgatggcgtttattcacggcttccgggccagtgagctgctggggctgcgcttgtcggatattgatcttgcaggaagacagctttatatccggcgcctcaaaaatggcttttcaacgtgtcaccccctccttcccgatgagtataacgtactgaaaagctggctcagggccaggaagtatcttgagaaaggggctgacggagactggctgttcctgtcgctacgacggcatccgctcagcaggcaacaatttttttacatacttcgtgaggcagggcggttggccgaattaacgatagcgccacatcctcatatgctgcgacatgcctgcggctacgcccttgctgataaagggattgatacacgactcatacaggactatctggggcacaggaatatccagcacaccgtaagatacaccgcaagtaacgccgggcgttttcatggaatatggcgaaaaaaacgtcgagtataaccgtacgttctgattcaaaaagttaagtccgcttcgcgctttcatcatcctctcagatttaccccttccacacaagagtcatacaatcgtaatctattgcttattaaggagttatccatataacaataaaaaaactaagggaaaatttacctggtccaaccagcactatgctgtatccatttttgtcctgcctgcacaaaatgttaattttaagtgttaaaaaaacgtattaaataatacttaatgctgattaattatcatatcaaagaattaaatcctttattttaccttttgaatcatattgttaaatcacagagaagtctgttcagggaaagctgatttacataatcaacatataaatcaatagattactgtgttttctatttgtcattttgtactccgcacagggcagaattaccctgcggcaggagcatgtactaccagggggactgacggcctgtgcagccgaaaagcagaaccggacagggtgtcagagagcagtgtttagatagggccagacgtcatttttcatacagacatggaatggctcccggtccacgaaagggtgcggacatgttgtttccacaacacgaagctgccgttgctggcgcagtgccgggtcggcaatggccagaggagaacaatctgatgacgcaagaatatgcggaaatgtccaccggaaggggggggaccagtaagtgccggtacagtatgggggcgaaaatatttttgctcctgctggcggtctccaccgtcgcagcgttgttcagcctgtaccaggttctgacgtactgatatgcagacgttaaccagagtactgccgcctctccggctgattatgttttgtcagtcaggcgaaaatcctacgcagtttccggataccggcggcctttgcgtggaggactgcgttcgtctcaggacaccagaagggctgctggatcggttgcgtcggtggcccggcgcgatggtgatatccgccggacggccatcaacccagcttctgctgtggcaacaggtttttctgcgttatccgcggacagtggttttttgcagcagtaacgcgtttttaccggttgacgtcagcgtggaaggttacttccgccatctgaggctgattaaacgcgccatgtcggtaagggttctggccagaatggctgagcttgccatatggtcatcactacagacatcgccttacgaggaggagatgaaaagcgcgttgagcgtgccggagctggtgatggagataaacagccgcacgctggtcaggttactgtcagagcgtctgccaaaacagggacggcgggtgctgggattactgttgtcaggctgtagcccggaaatgacggcccgtatgctgggaaccggcgtgaggcaggtctggctcgcggagcagacgctgaaacaacgctgggatatcccgacaggagtaccgctatctgatgcggtaagaataaggataccggacgtcggtccggacattagccaacagagtgggttggtaaaaactggggccggtaacgcaccggatttatgctgacagcatatttacatcatgccgcgcggtattcagacccataatgttgcgttctgaatgagttatcttcacaaaataaatatggcaatcatcgttgtccggaaataccgcataacatgtgacattaatgaatctgtaatcagtgcgagggtttacgcgctgtggcggtagcgtggaattatctggatgcgttgagtaaatttcactttacccttctgatataaatgaaaatggttctggataaactatctaatattatctgtgtctgcaaacagagtgacaaaaataatgcaacgtaaaaagatactaattgtaggtgcgggcctttcaggcgcagtaatagcacgccagttagccgagcagggacatgtagtcaatattattgatcaacgttcacatatcggtggtaacgcttatgatgcccgagatgagcacacgggtattatggtgcacgtttatggtcctcatatttttcatactgataatgaaactgtatggaattatgtaaataaatacgctgagatgatgccttatatcaataaggttaaggccacagtaaatggtcaggtattttctctacctatcaatcttcataccatcaatcaattttttggtgtcgcctgctcacctgatgacgccaggaaattactgcttcaaaaatgtgatagcaccattctggaaccacaaaattttgagcaacaggccttgcgtttcattggtaaagagttatatgaagccttttttaaaggttataccattaaacaatgggggcttcatccttccgcgttacccgcttctgtattgaaacgtatccctgttcgttttaattatgatgataactatttcaatcataagtttcagggaataccaaaatttggttatacacaaatggtcaagtccattgtcgaacacgaaaatatcgctgttgaactatgtcgctccttcactcaggaaatgcggacaaattatgatcatgtttttttcagtggcgcgctggatgccttttactcctgtcaatatggccgactggaatatcgtacattagactttaaaaaaataatttgccagagtgattatcaaggatgcgcagtaatgaattattgttcaatagatactccttatactcggattactgagcacaaatatttttctccgtgggagagacatgaagcttcaatatgttatcaagaatatagtcgggaatgtgaagctggtgatataccctactatcctgttcgcagggcagataaaatggatttactgaataaatatctgtcgcgggctaaaaaagaaaaaaatattactttcattggtcgtcttggcacttatcgttatctcgatatggacatcacgatagctgaagcattacagacggcggacgtatacttaacgtcgctatatgaacaaaaagaaatgccagcttttacagttaccgtttgatgaagtgtacagcgctaatcgtaacttttaaccgtcttgaaaaattaaaaaaaagtgtgcgagagactgttaaggcgggtttttcctctattgttatcgttaataatggctcaagcgacggtaccagggaatggctttcttcattaagtgaacctggcatcacgatacttaatcttaaagataatcttggtggtgctggcggatttaaagtaggtagtcaatatatatgctcatatagtaatgccgattgggtatttttctatgatgatgatgcttacccggaaattaatattttaaagcatttctcgttattagatacctcaagataccgtatatttgcgtcgcgagttcaggacacctatgggcggtcttgtcggatgaatttgcctttcattagggtcccatctacggtgtttgagactatttattatgcgatgcgcccagagaggttttctccagtaagaactcaggttactgatgttcaaactgtgtcattcgttggtatgattattgatcgaaaggtattgaataaccatcttaacgatatccatgatgaacttttcctttattatgatgattttttctttggttataagctagtattgtccgggcagaaaattcgttactccccagaaattaaatttattcatgatatctctattcatggaaagtgtatctgccccgaatggaaagtatattatctttgtagaaatttgttgctgctgagaaaacttttacccgttcccaggatattcagtgttctttctatagtgttacgcctctctaaatatctcgccatattaccatggcagcgtaagaaatttcgttatctatattttatctggcagggaatacttcatggacttaaaggtattagtgggaaatatcattagcaggacgaagagatgaaaaggttatgttattttgtaaattcagactggtactttgatttacattggacagaacgtgcgatagcggcaagggatgcgggttatgaaattcatatcataagtcattttattggtgaagagattataaaaaaattcaaaacgcttggttttatttgtcacaatgtgtctcttgttgctcagtcatttaatatgtttgttttttttagagcattccttaacgctcggaaaattattaaagagattaatcctgacttattgcattgtattacgctcaaaccttgcctgattggtggggttagcgccaggagaagtaatagtccagttgttatcagctttgtcggacttggtcgaatctttttatataataccgtgccaatgagaatattgcgtgcgttaaccgttttggtttacaaatatattgccggtaataagcgtggtgtttttatttttgaacatgataaagatcgacgaaaaatatcgcgtttagtaggtattgattatcataaaactatcgttatcgaaggtgctggaattaacccggatatttataaattctctatagagaaaaaacatgagataccgatagtcctttttgcaagccgaatgttatggagtaaaggtcttggcgatctcattgaagcaaaaaagatcctcagacaaaaaaatattcattttgttttaaatgttgcaggtatattggccgaggacgataaagatgctatccctttggagctcattcatcactggcataatgaaggactaattaactggctgggacgctcttcgaatgtatatgagcttattcagaaatcgaatatcgttgcattaccatctatttatccggaaggagtaccacggcttttattagaggcatcatctgtaggacgtgcatgtattgcttatgataccggcggatgtgatagcttaattattcataactataatgggttgatcgtgaaaagtaattcagctcaggagttagcggtagaattagagtatttgttaaaaaatccacagattcgcttagagatgggggcgaatggaagaaaacgtgtaaaggaattgttttccagcatattagtcattaataagacattgcaaatttataaagacactattggttgctaacaccataaagtgcttatgaagtaggtcagtgtttagataaatagtatgtaaatattatagaaaataaataagttatattttcatatcgttaaagaataagttcttcaggtaaaggtgacacggaaacaatgaatgatttgaaagaagctctggccaggcaccaactttggatttcgctaggttggaatgatgtcctgggacgataccggcgatcggtgttagggcctttttggataacgatttcgatgggggtcaccatatcagcgatgggacctctttacggttcgctgttcagttctggttccgaaaattttatcatgcatcttactttaggtatgatcttttgggcctttctatcagcaactattaatgagtcatgcggaatatttaatgagtccgcatcaattattaaacaatctgaccttccgctatatttatatatattacgtgttttctatcggcagtttatgattatgttgcataattttatcattatacctttcgtgattttttttaccaatacatcggtaaatcttgatattctcctttttatacctgcaattgtaataacatccatctcattaatttctacaggtatgattctcgccattttttgcacaagatatcgtgatatgggaccggttgttcaaagtgtggtaacgttgtgtttttttataactcccatcatttggacatcggaacaattaccaaagggaagaaaggagtttgttgattataatattttttattactttatggagatgctcaggaaaccattaatgggaactgtaccagatgtaactatatggttttacacaataataacctctattattatgttgatggtctcaaccttagtgttgactaaatatcgctcaagaatcgtatactggttataattaatgaaaatctcttgcaaaaacgttggcgtaatactccctatatttaactccagccaccgttcatttaaaaaaacttttctacaggctgcttcaggtggacgaattggctcatcgaataccgggattattgaagtagaggcattaaaaaaaattgattttacgcttaccgaaggtaaccgtcttgcgcttatcggacacaatggttcgggcaaaacaactcttctgagagtacttgcaggggcctataaaccaacttcagggaagtatgaatgtattggtcgagtcaccagcctcattgatcccatgatgggaatggatggtgagcttaccggcctggaaaatataaaactgaggggactatttctcggtctgtcaaaaaatgaaataaaaaatattacagaagatgtcatcgagttcagcgagttaggtgattttattaaaatccccgttagaacgtattctagtggtatggttctgaggcttggtttttctatttctactgcaattaatcctgaaattttactgatggatgaatggatgagcgtgggtgatagtgattttaaaagaaaagcagagatgagattaaatagctttatctctaaagcgggcattatggtaatggccactcacgatgatgaactggctaaatctgtatgtaataagttcatcaggcttgagcacggtgagatagttagcaaaggcggattttaatattcttattgcagtatttatatcactacgcggtgagaaatttactattttataatagcgttaccccagataatataaatttataggttcgttatgtattttttacttcaaaaagtaattttaccaaacattgatctatgcacggaagagcagctttatttcagaactcagggcgggaagtataactatacctcacgtaacttacttgttccgcgtcataaggttgcatattttgatactttttttaatgcattctcaattaagaaatggaaaaaatatacaaccttaacatcactttttttgcgggttaatataattggtcgcggaactataactgtaaggcataaagagaatggtgtcattagagtattaaagcaaattgattttaaatcgtcatgtaatattagtgatgagattgagattgatatatcaaaaataaattttggatatatctatgtggagtggcaatcagacgaagactctgttttaaatggatttgaattgctgactaaagatcatgttagtaaatcatctatggctttagttataacaacttataatagaaaagaagctgttactaaaacaatcaatagaattaataaaacactcttaacccagagcgaatttaaagatcgttttaaattgattgtcgttaataatggcgaggcgattaatcacccgtcaggaaacggcattatagttatcaataatgaaaacctcggtgggtcaggcgggtttatgagaggtttgatagaggcagggaaaatcaacgatgtcaaacatgtcatatttatggatgacgacggctcatgtgaaattgaatcgatttgtcgaactcatgcttttttactgatggctaaagacaaaaatacagttgttactggctgtatgctttttgaagataacccggcaatcatacatgaatctggtgccatatggcatagagattttttacattacccggataaacattatctggatgctcgggaaatagattctttagatacttttgataatgaaagaaaaataggctacggtggatggtggttttttgcctttaatattaacgctattgaatattactcatttcctttctttgttcgtggtgatgacctgctatttggatatatgcataaaaaacataatattgtcacacttaatggtgtggcttcgtggcaaatggattttgaaagaaaaatatcggttctaaatagctatttgaacttcaggactgttgctgtacctgcattaattagtaaaagaaagtttgctgcactactgttaagtgttttctttgtgcgggaagtctttcttgcgagtttttcatgccgctatgaacttgccagagcaatgattatgtcatataacgattgtctttctggacgggagttttgggaagataatgtagatcttctggagataagaaaaagaattaatgcaataactcataatgaaaaattcaatgtagaaggtattgatattgttaatggttgtgttgattacccatgttctggtaaagaaaaagccatctacaaattttttagatgcataacccttaatggacacttaattccagctttctttttaattaaaaaaccaatcgtggttgattatcgtcattatcaccctactaagttttcattccggagaattactatctatcatttaaatatagaaaatggcaaattattaaaacttacccactcaaaaatggagttttttaaagttattattaatggtttgtttacggcagtcaaaaatttttatcggtttaaatctgcaaaaaaagagatgaaaaatagtttgccctatcttacctcaaagctcttttggtataaaaaattcaataaaaaatctgaagataaatattaaacatgatgtaagtggtgttgatgagaattataccgattttttaattatatgactatgataatcttaggtatggttctgttgctacaccttatctggtgtcagtctaataaaatattataatccttacccaatgtcagcatttattcatagggtgttaatttttatatataccgtaaaacgcgaaatcagaatatggaaaagagtcttttagttattgtccgacataaacctgggcgtactcgtctattaatgcgggccttgcaatccattaatgaccagacgttcaaaaaaataaatatcatcattttctgcatggaggaagaattgaaatgtcacaatgtggatgatttttatctgaaagaactgtcaaatatatatagtgttatctacgacgaaagctgtatctttaatgctattaagatgtctgaatctaattatttatgctttatggatgatgacgattcttgggcccctgaatatgtgtcaaggctactcagtgttttggcgaatatacagtcaacgtattcatctgtaaatgcaatagcatgccatacaaataaagttgctgagattgcggaaaataatagaataattataaattcaacgcaaccatggaaccactatttaaatgctggccctgttagttttgatgttatttattacaggaattctattccactttcctcgtgtttattcgataaaaattctgttatcgatatgattgaaagtcataaattatcctctcctgcatttttctggcctttttttattcattaccttgcagaaaatgatgtttggatcttacctgaagcactggcattttatcatttcagagaaaatgatgactttgaatttggcaattataccgtaattaacaatgagttatttgatatagaatgcaaaattgcagaaaataaaatgatgagaagtattgatgactcatcattgctcaatgtgttactttcaaatattgctaacaatagtctttttcataaaatttcttatattgaaaataagattaaataaaatatggatatgaactttaaaaaatacaagaccgtaagctttgatatctttgatacattggttagccggaggatttaccgtcccagagatttgttttcattaatgcaatcaactttagcaactgagaaattttttatatcagcgtacgagattggtattattgataatttcccagagataagagttcaggcggaagtaagtgccagagagaatagggtcaggcgttttggcggcgagccggaaatacttatatctgaaatatacgatgaaattttaaaaaagcatccgcagctttcaccagcgacagtaaaaaagataatcgatctggaaatacaaatggagaagattgttttatataaaaatgcgcgtggaagctgtttgtttgaaaaggctattagtgatggttgcaaagtcattttaattagtgacatgtaccttccatcagcaatattaaaggagttgttaacatcatgtggctatgatatcagtaacattccagtttattcatctggcgaagagcggtactctaaaaatagtggtaaattattttcaatagtcaagaaaaatgaaaatgtagatattgcatcgtggatgcatgttggcgacaatgttcatgctgatattctgaatgctaaaaaactcggcataaatactctccatgctgattggtcagagtataatcatgggatatctaatcattggaaagctaaagatattattggtgaatctatttgtaagactttattacttaaacaagtttctgctttccatcaaaatgatcctttaaacgagataggatttaaagtatttggtccattattattaggttatgtatcctggttagcgaatcagttaaagattcataaaattgataaagcgctttttttagcacgcgatgctcacttaatctataaaatttataatgaatacttttcagaagaacatgtaaaatgtgaatatttatatatatcccgcgcatcagcttatatggtggggatgactgattggccgatgcacaggatttggcatctttttggtggtaagaataagaaaagtattaaaaagatacttgctatcgcggggttagatgcgagtgagcatatttcagatatacatcatgttggttttcctgacgaggagtatattcctgtttcaggagaggaacataaggttcactggcttataaataaattatttccatatattttattaaaaaatactcagcacagggaagtttacgctgattactttaaaacggcctgtgaaggttataaaaatatagcacttatcgatgtaggatggatgggtaatattcaatcagtatttgctcgttctttaggtgcgcaatgggcagaaaaacaaatacatgggttttatttggcaacttttgctggcgccaatgataaccgatctatttataataagatgtttggttggctaaccaactatggccatcccaacgataagtgtgatcttttcttatcaggaggggtggaaataatggagttcgctatggctgacaatactgggtcaacaattggctataaaaaaacggataatggaataattcctgtacgtgaagatagcagtggttctgaaattgagtatttaaaaaaagcagcaagattgcaatcagggattatttctttttttgagtacgtcaaaccgctcatacaaaaaggaaattatgcagcacttagtagtgttgtattgtcagaacctttttttgaattgatagccagaccctcaagcgctcaactggacgccttatcttccctcacacattcagagtccgcgggatctaacgcagaaagaatcgtgctagccaagaaactgcctttaaaggataaactttttcccggagaaaattatatcaaagagttgaatgccagttattggaaagaaggctttaaaaggatcaacagaaaaaaattttgggcaaaatataactaagcgtcatttaattccggtaggcagacaatcattattgggcgctcgcccgacaagggctgagtcgattatgccctggcgcgatcatgttaaccctgacggggaagtggtctcgtgctgcgataatgttattatcactggataccaccgcctgtttgtccatccgctgtggatgttcattatggtgttcgatgtgcattccagatagtcagaggcggtgtagtccattaatcaactgttaacaaaggatattatcatgcctgaaggcccggaaattcgtcgtgcggcggataatctggaggcggcaatcaaaggcaaacccttaaccgatgtctggtttgcctttgcacagttaaaaccgtatgaatcgcagcttaccggtcaacttgttacccggatagagacgcggggaaaagcgttattgacccacttttcaaatggcctgacgctctacagccacaaccaactctatggcgtatggcgggtgatcgatactggtgaaataccgcagaccacgcgtatattgcgcgtcaggctacaaacggcggataaaactattctgctttatagcgcgtctgatatcgaaatgctgacagcagagcagctcacgacgcacccctttttacagcgagtcggtccggatgtgctggacgcgcgtctcactccggaagaggttaaagctcgattgctgtcgccgcgttttcgcaaccgacaattttccgggctgttgctggatcagtcctttctggcgggactggggaattatctgcgcgttgaaatcctctggcaggtaggattaaccggacagcataaagcgaaagatctcaacgaggcgcaactgaatgcgctttctcacgcgctgttggatattccgcgcctttcctacactactcgcggtcaggcggatgagaacaagcatcatggcgcactgtttcgctttaagcttttccaccgtgacggcgaagcgtgtgagcggtgcggcggcattattgaaaagacaacactgtcctcacgcccgttttactggtgcccgcattgccagaaatagccggaaccgacatcggcgagcggctattgcctgatggcgcgacgcttatcagccctacaaaggttgtttgggcgcataggttgatataaaacgggccactgctggcccagttaacagaatgctgaacagccgtagggtttgcattgccatgatgagcgccatatcggcactgcttcctgccgcgatcgcggcaaccgtatccagaccaccgggactggtggcaagataagccgtcataaaatcaatctgcatgtagtaagccattccccacgccatcgcggcgcaaatcgccatcagcgcgaaaattgacaataagatttgcggcaatggccgcagcgccataaaaaacacctgtctgtcaaaacccagcccaatacgccagcctatcgccatatacgccacggccagcagccattcgggtaattcaatctcaatgatgccttgcgaatggagaagcgcgcctgccaacatggggagcagcatcgtgccggaagggatacgcatcaggcgaccggcaatgcccgccacgatcgctaataacagcgtcgtcaatacattaccgctaagcggcggaaaccagatcacctgttggctgaccgctgccgcgctgtcgccgagtatcaggcgtgtcaccagcaccgccgcgccagccacaaacagtacccgtagatactgcataaacgccaccaggcggatatccgccccgtaatcttgcgccatcgctaccattgccgccgcgccgcccggcgaagacccccatgcgccggtgttgccgggcagtgagctgtaacgtaccagcagccagccgactaccgcgctggaaagcagcgtcaccagcaacactaaaagcacgaccggccagtagagggcgagggtggtcaatatcgaaccggttagattttgggcgatcatacagccgagaattgcctgcgcggcgagaaaaataccgcgcggaagttgtagcgtactacctcgcaaactcaacacgatacccgcaatcattggaccgagcagcattgccgccggaaggtgcagatagagaaaaataagggaaatgagcagcgataacaggaacaacaaaaaccactgcagaatcggcattccatgctccctgaatgatatttagcgaaaccttaattaatcatagagagtaacggggtaagaataaaataatgaggataagaaaaaagggaaaatgtaccggatggcgagggttgcgtcgccatccggttgtcaattaacgcttcagcgccgatttaaaatcgcgtttatcgtagccggtatacagctgacgaggacgggcgattttcatgccgtcagtgtgcatttcattccagtgtgcaatccagccaacggtacgcgccatggcgaagatcacggtgaacatggaggacggaatgcccatcgctttcagaatgatgccggagtagaagtctacgttcgggtacagtttcttctcgatgaagtacgggtcgttgagcgcaatgtgctcaagctccatcgccacttccagcagatcgtctttggtgcccagctctttcagcacttcgtggcaggtttcacgcatcacggtggcgcgcggatcgtagtttttgtaaacacggtgaccgaagcccatcaggcggaaagaatcattcttgtctttcgcacggcgaacaaattccggaatgtgtttaacagagctgatttcttccagcattttcagcgcggcttcgttggcgccgccgtgcgcgggtccccacagggaggcgatcccggcggcaatgcaggcgaatgggttggcgccgcttgaacctgcggtacgtaccgttgacgttgaggcgttctgctcatggtcagcgtgcaggatcagaatacggtccatcgcgcgctctagtaccggattcacttcataggtttcacacggcgtggagaacatcatgttcaggaagttaccggcgtaggaaaggtcgttgcgcggataaacaaacggctgaccgattgaatatttgtaacacatcgccgccatggtcggcattttggacagcaggcggaacgccgcgatttcacggtggcgcggattgttcacatccagcgagtcgtggtagaacgctgccagcgcgccagtgatcccgcacattaccgccatcggatgtgagtcgcgacggaaagcatggaacaggcgagtgatttgctcatggatcatcgtatggcgggtgactgtcgttctgaactcgtcatactcttcctgcgtcggtttttcgccgtacagcaggatgtaacagacttccagatagttggaatcggtagcaagctggtcaatcgggaaaccgcgatgcaacaaaatgccttcgtcgccgtcgatgaaggtgattttagattcgcaggatgcggtagaggtgaaaccagggtcaaaagtaaaaactccttttgaaccgagactacgaatatcaataacatcttgaccgagtgtaccttttagcacatccagttcaatagtagtgtcaccagtaagggtgatttttgcctttgtatcagccatttacggtctccttagcgccttattgcttaagactgccggaactcagacttgccttctccacgtcatcttcctcgtcgttagtgcagggaagattctgtgtatgcatcaatcaaccgttaccagtttgttatttggctcgccgctctgtgaaagaggggatgacctgggtacagagcaatgggcgcttgcaggtaacgacttgattaatttcgaattagcagcaaatcaggaacgtagcaatccgagtaatgtaacctgtctatcactaataactgtcctgaaagaatgggtcaatatcattgtactgttgcataacttattaacaggtgaaagagtgaccccataacttttacgcattatatgctttttctggtgtcgtttgtaacaattttgtttaatgtttgtcaaatcagatgattgaaaattaaaaaaatgttgttatcgtgacctgtgtcactgttcaggataaaacccgacaaactatatgtaggttaattgtaatgattttgtgaacgtcctatactgccgccaggtctccggaataccctgcaatcccgagccacccagcgttgtaacgtgtcgttttagctactggaagcagtgttttacatgacgcgcagttatagaaaggacgctgtctgacccgcacgcagaccggaggaaggaaatcccgtcgtctttctggctacaggtagattcacctctgtaaccgaagtcttaagggaataataagaacagcatgtgggcgttattcatgataagaaatgtgaaaaaacaaagacctgtcaatctggatctacaaacgattcggttccccatcacagcgatagcgtccattctccatcgcgtatccggtgtgattactttcatcgccgtcggcatactactgtggctactgggcaccagcctctcttctccggaaggattccagcaggccgccgacatcatggacggcttcatcgttaaatttatcatgtggggcatccttaccgcgctggcgtatcacgtcatcgtgggaattcgtcacatgttaatggattttggctatctggaagaaacattcgaagcgggtcaacgctctgccaaaatctcttttgttatcactgtcgtgctttcacttctcgcaggagtcctcgtatggtaagcaacgcctccgcattaggacgcaatggcgtacatgacttcatcctggtccgtgctaccgctatcgttctgacgttatacatcatctacatggtgggttttttcgccacgagcggcgaactgacctttgaagcctggaccggtttcttctcatcggccttcaccaaagtcttcaccctgctggcgcttttttccatcttgattcatgcctggatcggcatgtggcaggtgttaaccgactacgttaaaccactggcagtgcgtctgatactgcaactcgttatcgttgttgcgctggtggtttacgtcatctatggatttgttgtggtgtggggtgtgtaatgaaactgccagtcagagaatttgatgctgttgtgattggtgccggtggcgcaggtatgcgcgcggcgctgcaaatttcccagagcggccaaacctgtgcgctgctctcgaaagtcttcccgacccgttcccataccgtttccgcgcagggcggtatcaccgtggcgctcggcaatacccatgaagataactgggaatggcacatgtacgacaccgttaaggggtcggactacattggtgaccaggatgccatcgaatatatgtgtaagaccggaccggaagcgattctggaactggagcacatggggctaccgttctcccgtcttgatgatggacgtatctatcagcgcccgttcggcggccagtcgaaaaactttggcggcgagcaggcggcacgtaccgcggcggcggctgaccgtaccggtcacgccttgctacacacgctgtatcaacagaatttgaaaaaccacaccacgattttctccgaatggtatgcgctggatctggtgaaaaaccaggatggcgcggtggtggggtgtaccgcactgtgcatcgaaaccggtgaagtggtgtacttcaaagcccgcgcgacggtgctggcgaccggcggcgcaggccgtatctaccagtccaccaccaacgctcacatcaacaccggtgacggtgtcggtatggcgctgcgtgccggtgtcccggtgcaggacatggaaatgtggcagttccacccgaccggcatcgccggggcgggcgtgctggtgacagaaggctgccgcggcgaaggcggttacctgctgaacaaacacggcgagcgctttatggagcgttatgcgccgaacgccaaagacctggcgggtcgtgacgtggtggcgcgttccatcatgatcgaaatccgtgaaggccgcggctgtgatggtccgtgggggccgcacgctaaactgaaactggatcacctgggtaaagaggtgctggaatctcgcctgccgggtatcctggagctgtcccgtactttcgcccacgttgacccggtgaaagagccgattccggttatcccgacctgccactacatgatgggcggtattccgactaaagtgaccggtcaggcgctgaccgtgaacgagcagggcgaagacgtggtcattccggggctgtttgcggtaggcgaaatcgcctgtgtatcggttcacggcgccaaccgtctgggcggtaactcactgctggatctggtggtctttggccgcgcggcggggctgcatttacaggaatccatcgccgagcagggcgtgctgcgcgacgccagcgagtctgacgttgaaggttctctggagcgcctgaatcgctggaacaataaccgcaatggcgaagatccggtggctatccgcaaagcgttgcaggagtgtatgcagcataacttctccgtattccgtgaaggcgacgcgatggcgaaagggcttgagcagttgaaagtgatccgcgagcgtctgaaaaacgcccgtctggatgacacgtccagcgagtttaatacccagcgtgttgagtgtctggagctggataacctgatggaaaccgcctacgccactgccgtatcagccaacttccgaacggaaagccgcggcgcgcatagccgcttcgatttcccggagcgtgatgatgccaactggttgtgtcataccctgtatcagccgcaaacggaatccatgacgcgccgaagcgtcaatatggagccgaaactgcgtccggcgttcccgccgaagattcgtacttattaattgcggagacaggatgatgaaactcgaattttcgatttatcgttataacccggatgtcgataacgctccgcgtatgcaggattacaccctggaaggcgaagaagggcgcgacatgatgctgctggatgcgttaatccagcttaaagaaaaagatcccagcctttctttccgccgttcctgccgcgaaggtgtgtgcggttctgatggtttgaatatgaacggtaagaatggtctggcctgtattacccctatttcggcgctgactcagccgggtaagaagattgtgattcgcccgctgcccggtttgccggtgatccgcgatttggtggtagacatggggcaattctacgcacaatatgagaagattaagccttacttattgaataatgggcaaaatccaccggctcgtgagcatctgcagatgccggagcagcgtgaaaaactcgatgggctgtatgaatgtattctttgcgcctgttgctcaacatcctgcccgtcattctggtggaacccggataagtttatcggtccggcggggctgctcgcggcgtatcgattcctgatcgatagtcgtgataccgagactgacagtcgtctggaagggatgagcgatgcattcagcgtattccgctgtcacagcattatgaactgcgtcagtgtatgtcctaagggactgaacccgacgcgcgctatcggccatattaagtcgatgctgttgcagcgtagcgcataagtagttgtagtggttgccggatggcgacgtacagtcttatccggcctacaggcgcaaccccgtaggcctgataagcgcagcgccatcaggcaatagaagtgcaggaaacctctaaaaactgccatatgattagtaataatcgagatgttcagagcgagacaaggcgcggtctgaacgaatcttcgggagcatagttaactatgtgaccggagtgagcgaaggccgcaacgcagtcgtagcctgaacagcgaagattattagacagtttttaaaggttccttagcggacgcagatgacacgacagtccgcaacaagtgaaccccggcacgcatacagcgtatgcgtggttagtatccacggcgaaatactcgtcatagttcacgttgcatgtgcgttggctgcacttgctcaccccggtcacttactggatgtaagctcccagggattcgcaagcttgccgccttcctgaaacgtgacctatttagagtattaaataagcagaaaagatgcttaagggatcacgatgcagaacagcgctttgaaagcctggttggactcttcttacctctctggttcgaatcagagctggatagaacagctctatgaagacttcttaaccgatcctgactcggtagacgctaactggcgtttgacgttccagcagttacctggtaccggagtcaaaccggatcaactccattcaaaaacacgtgaatatttccggcggcaggcgttggctggctcacgtcactcttctacgatttccgaccctgacaccaatgtgaagcaggttaaagtcctgcagcttatcaacgcttatcgtttccgtggccatcaacatgcaaacctcgatccgctgggactgtggaagcaagaacgcgtggcggatctcgatccttctttccatgatttgaccgaggccgatttccaggaaaccttcaatgtcggctcctttgccagcggcaaagagacgatgaagctgggcgagctgctcgacgcgctcaaacagacctactgcggcccgattggcgctgagtatatgcacatcaccagcaccgaagagaaacgctggatccaacagcgcatcgaatccggtcgtgcggcctttagcgctgacgagaaaaaacgcttcctgaacgaactgaccgccgctgaagggctggaacgttatctgggcgccaaattcccgggtgcgaaacgtttctcgctcgaggggggagatgcgctgatacccatgctgaaagagatggttcgccatgcgggtaacagcggcactcgcgaagtggtgctggggatggcgcaccgcggtcgcctgaacgtgctgatcaacgtactgggtaaaaaaccgcaggatctgttcgacgaatttgccggtaagcataaagaacatctgggtaccggcgacgtgaagtatcacatgggcttctcgtcagatatcgaaaccgaaggcggtctggttcacctggcgctggcgtttaacccatcgcatctggaaattgtgagcccggtggtgatgggctccgtgcgcgcccgtctggacagactggacgaaccgagcagcaacaaagtgttgccgatcactattcacggcgacgccgcggtgaccggccagggcgtggttcaggaaaccctgaacatgtcgaaagcgcgcggttacgaagtgggcggtacggtacgtatcgttatcaacaaccaggtgggtttcaccacctctaacccactggatgcgcgttcaacgccttactgcaccgatatcggtaaaatggtccaggcgccgattttccacgtcaatgcggacgatccggaagccgtcgcttttgtgacccgtctggcgctggacttccgtaatacctttaaacgcgatgtctttatcgatctggtgtgctaccgccgtcacggccacaacgaagccgacgagccaagcgcaacccagccgctgatgtaccagaaaatcaaaaagcatccgacgccgcgtaaaatctacgccgacaaactggaagctgataaggtcgcaacgctggaagatgccactgaaatggtcaacctctatcgcgatgcgctggatgcaggcgaatgcgtggtgaaagagtggcgtccgatgaatatgcactcgttcacctggtcgccgtatctaaaccacgaatgggatgaagcatacccgaacaaggtagaaatgaagcgtctgcaggagctggcaaaacgtatcagcaccgtgccggaagccattgaaatgcagtctcgcgtggcgaaaatttatggcgaccgtcaggcaatggcggcaggcgagaaattgtttgactggggcggcgcggaaaatctggcttacgccacgctggtcgatgaaggcattccggtgcgcctgtccggggaagactctggtcgcggcaccttcttccatcgtcatgcggtgatccacaaccagacgaacggctcaacgtatacgccgttgcagcatattcacagcggtcagggacagtttaaagtctgggactccgtgctgtctgaagaagcggtactggcttttgaatacggttatgccacggcggaaccacgtaccctgactatctgggaagcgcagtttggcgattttgccaacggcgcgcaggtagtgattgaccagttcatctcctccggcgagcagaaatggggccggatgtgcggtctggtgatgctgttgccgcatggctatgaagggcagggcccggagcactcttccgcgcgtctggaacgttatctgcaactttgcgccgagcagaatatgcaggtttgcgtgccgtccaccccggcgcaggtctaccatatgctgcgccgtcaggcgctgcgcgggatgcgtcgtccgctggtggtgatgtcgccgaaatcgctgctgcgtcacccgctggcggtttccacgcttgatgaactggcgaacggttccttccagccggccattggcgaaattgacgagctggaccctaaagccgtaaaacgcgtggtaatgtgttctggtaaggtttattacgacctgctggaacaacgtcgcaaaaacgaccagaaagatgtcgctatcgtgcgcatcgaacagctctatccgttcccgcataaagcggtgcaggaagcgctgcaaccatacgctcacgtccatgattttgtctggtgccaggaagagccgctcaaccagggcgcatggtactgcagtcagcatcatttccgtgaagtgactccgtttggggccgctctgcgttatgcaggtcgcccggcctccgcctctccggcggtagggtatatgtccgttcaccagaaacagcaacaagatctggttaatgacgcgctgaacgtcgattaaataaaggataaataatgagtagcgtagatattcttgttcccgacctgcctgagtccgtagcggacgcgaccgtcgccacctggcataaaaaaccgggcgatgcggttgttcgtgacgaagtgctggtagaaatcgaaactgacaaagtggtactggaagtaccggcatcagcggacggcattctggatgcggttctggaagaggaggggacgactgtcacctctcgccagatcctgggtcgcctgcgtgaaggaaacagcgcgggtaaagagaccagcgcgaaatctgaagagaaagcgtctacgccggcacagcgccagcaggcgtcgctggaagaacaaaacaacgatgcgctcagcccggcgatccgtcgcctgctggctgaacacaatctggaagccagcgccattaaaggcactggtgtgggtgggcgtctgacccgtgaagatgtggaaaaacatctggcgaaaggcgagtctaaagcacccgctgttgaacctgcagcacaacccgctctgggcgcgcgcggcgaaaaacgcgtgccaatgacccgcctgcgcaagcgcgtggccgagcgtctactggaagcgaaaaattccaccgccatgctgacgaccttcaatgaagtcaacatgaagccgattatggatttgcgtaagcagtatggcgaagtgtttgaaaaacgtcatggtatccgcctgggctttatgtccttctacgtgaaagcggtagtggaagcgctgaagcgttatccggaagtgaacgcctctatcgacggcgatgacgtggtgtatcacaactactttgatgtgagcatggcggtgtctacgccgcgcggcctggtcacgccggtcctgcgtgacgtggatacgctgggcatggctgacatcgagaaaaaaattaaagaactggctgtcaaaggccgcgacggcaagctgaccgtagaagacctgaccggtggtaactttaccattaccaacggcggcgtattcggttcgctgatgtctaccccgatcatcaacccgccgcagagcgcgattctgggaatgcatgctattaaagacaggccgatggcggtggatggcaaggtggaaatcctgccgatgatgtacctggcgctctcttacgatcatcgcctgatcgatggtcgcgaatccgtgggcttcctggtcaccatcaaagagttgctggaagatccgacccgtctgctgttggacgtgtagtcagcaagagcatcacctgctacctgtaggccggataaggcgttcacgccgccatccggcgatggtgtaatgcctgatggcgcgcagctttcaggcctacaggtctaaagataacgattacctgaaggatggacagaacacatgaacttacatgaatatcaggcaaaacaactttttgcccgctatggcttaccggcgccggtgggttatgcctgtactactccgcgtgaagccgaagaagccgcgtctaaaatcggcgctggcccgtgggtagtgaaatgtcaggttcacgctggcggccgcggcaaagcgggcggtgtgaaggtagtaaaaagcaaagaagagattcgcgccttcgcggaaaactggctgggcaaacgtctggtgacctatcaaacagacgctaatggccaaccggtaaaccagattctggttgaagcggcgaccgacatcggcaaagaactgtacctcggcgcggtagttgaccgtagttctcgtcgcgtggtctttatggcgtctaccgaaggtggcgtagagatcgaaaaagtcgcggaggaaaccccgcatctgatccataaagtcgcgctcgatccgctgaccggcccgatgccgtatcagggacgggaactggcgttcaaattgggtctggaaggtaaactggtgcagcagttcaccaaaatctttatgggtctggcaaccattttccttgagcgcgacctggcgctgatcgaaatcaacccgctggtgattactaagcagggcgatctgatttgcctcgacggcaagctgggcgctgacggcaacgcgctgttccgccagccggatctgcgtgaaatgcgtgaccagtctcaggaagacccgcgtgaagcgcaggcagcgcagtgggaactgaactacgtcgcgctggacggcaacatcggttgcatggtgaacggcgcgggtctggcgatgggcaccatggacatcgttaagctgcatggcggcgaaccggctaacttccttgacgtgggcggcggcgcaaccaaagagcgcgtcaccgaagcgtttaaaattatcctctcggatgacaacgtgaaagcggttctggttaacatcttcggcggtatcgtccgttgtgacctgattgccgacggtatcatcggcgcggtggaagaagtgggcgtgaacgttccggtggtggtgcgtctggaaggcaacaacgccgaactcggcgcgaagaaactggctgacagtggcctgaatattattgcagcgaaaagtctgacggatgcagctcagcaggttgttgccgcagtggaggggaaataatgtccgttttaattaataaagataccaaggttatctgccagggcttcaccggtagccaggggactttccactccgaacaggcgattgcttacggtacgcagatggtgggcggcgtaacgccgggcaaaggcggcaccacgcatctggggctgccggtgttcaacaccgtgcgcgaagcggtagaagctaccggtgcgaccgcatccgttatctacgtcccggcgccgttctgcaaagactccatcctggaagcgattgacgcaggcatcaaactgattatcaccatcaccgaaggtattccgacgctggatatgctgaccgtgaaagtgaagctggacgaagcaggcgtgcgcatgatcggcccgaactgcccaggtgtgatcaccccgggcgaatgcaaaatcggcatcatgccgggtcacattcataagccgggtaaagtgggtatcgtttcccgttccggcacgctgacctacgaagcggttaagcagaccaccgactacggtttcggccagtccacctgcgtgggtatcggcggcgacccgattccgggctctaactttatcgatatcctgaaactgttccaggaagatccgcagactgaagcgatcgtgatgatcggtgagatcggcggtagtgcagaagaagaagcggcggcttacattaaagaccacgtgaccaagccggttgttggctatatcgcgggtgttaccgcgccgaaaggcaagcgtatgggccacgcgggcgccatcattgccggtggtaaaggcactgcggatgaaaaattcgcagcgctggaagccgcgggcgtgaaaaccgttcgcagcctggccgatatcggcgaagcgctgaaagcaattataaaataaaactcgctgttcctgcgggaacagataaatgtccgttttcgacatggttggccacctttacggtggccttttttatggctttattgtttgtggcaaagtacgggtgaagcatccgggatataaaattattggctttgtaaatactgaactataggaaaataatgcctcattaaaaaaacatggtggagtctaaaaataattgataataaccgtctggcagcggcagtaaatttactcagtttgctggttaactcttttgcagcaaatacagatgctgtcttagtgaaatacctgccgacctcactggagacggattatgcgctttccgccatgaaaaaaacgcattgcagcattacactatgttgacgctaacctctatagtaaattgacgcttgactctgtggccgcgcatgtttgcctgagcgcgaactacatgtctcctcagatgtatcgcgcttacacagactgcttgtttaatggcagaataaaacagctattttaatcataagagtaccgacattatttccatgaagtattaaagatatcgtttaataaatcatatgaacttttgctggttaaaagaggttaactttaaaaattattaagaacttattgacactattcgttcgtgattaatcatgtttaaaggatatttatggctgcgaataaacagaattatcactatgagtgacgtagaaattgagggtgaatctgtgaaggtgataacagaatcttcgctataataattatagagaggtaaatacggtgttattgaaataaagaaaaattagcgaataaaatgtttgtttctggctatctggaaagcttattagcgataattaaggcgataacctggcaagatgagcctggccattagtcgtcgggaaagggaagttggggcagggtaatcccggtgggatgatggcgcgtgtgcaatgagatagtttctttgctgtgttaattataagtaaaataaaaatagactaaatgtataaaataataagtattgataacctgcagaaaaaatctgtgagctatttagcaataattgaacatcaatgtggaatgttttttactggatgcggggcagtaaaaaacgcacaaaatgtttagccttatcgaataagtctatttttacagggggtttgaaattactctttgcaaaaacaaaaagttaacaaaaaattcaccatgcattcaatgaataaacattattaacattaacttcaaaaattgattttaatcaatatttaaatgttggaaaagagcatcaaaactggttaaattgtccgtgatcaaattccctgaaaagcgatagattagccataaattgatcgctgtcgaaaaaagcaaatctgacccactaaaaacctgtttattgtaagggttttacggcgtaatatatttgcgggatcaatttgggttttttattaacatgtttgtaacttttcatcattactgtttccttcccgaggggatagtacgatggaaggccgcaaataaatttgtattggggcatgcgtgtgaccctttctaacggggttcactctcggagtcttcatgcgatgagcaaggagtcatgatgttagatatagtcgaactgtcgcgcttacagtttgccttgaccgcgatgtaccacttcctgtttgtgccgctaacgctcggtatggcgttcctgctggccattatggaaacggtatacgtcctttccggcaaacagatttataaagatatgaccaagttctggggcaagttgtttggtatcaactttgctctgggtgtggctaccggtttgaccatggagttccagttcgggacaaactggtcgtactactcccactatgttggggacatcttcggtgcgccgctggccatcgaaggtttgatggccttcttcctcgaatccacctttgtaggtctgttcttcttcggctgggatcgtctgagtaaagttcagcatatgtgcgtcacctggctggtggctctggggtccaacctctccgcgttgtggattctggtagcgaacggctggatgcaaaacccaatcgctgcggatttcaatttcgaaaccatgcgtatggaaatggtgagcttctctgaactggtgctgaacccggtagcacaggtgaaatttgttcacactgtggcgtccggctatgtcaccggcgcgatgttcatcctcggtatcagcgcttactacatgctgaaaggtcgtgacttcgcctttgctaaacgctcctttgctattgccgccagcttcggtatggctgccgtactgtccgttatcgtactcggcgacgaatccggttacgaaatgggcgacgtgcagaaaaccaagctcgctgcgattgaagctgaatgggaaacgcaacctgctccggcctcctttaccttgttcggtattcctgaccaggacaaacaggaaaaccatctggcgattcagatcccttatgcgctcggtattatcgctacgcgttccgtggacacgccggttattggcctgaaagatctcatggttcagcatgaagagcgtatccgtaacgggatgaaagcctatgaactgctggagcagctgcgcgccggttctaccgaccaggccgttcgcgaccagttcaacagcatgaagaaagatctcggttacggcctgctgctgaaacgctatacgcctaatgtgactgacgcgaccgaagcgcagatccagcaagcgacgaaagattccattcctcgcgttgcgccgctgtacttcgctttccgtatcatggtggcgtgcggcttcctgctgctggcgatcatcgcactttccttctggagcgtgattcgtaaccgcatcggtgagaaaaaatggctgttgcgcgcggcgctatacggtattccactgccgtggattgcggttgaagcaggttggttcgtcgccgagtatggtcgtcagccgtgggcgatcggcgaagtgttgccgacagccgtagcgaactcatcgctgaccgtgggcgatctgctgttctccatgttcctgatttgcggcctgtataccctgttcctggtggcagaattgttcctgatgttcaaatttgcacgccttggcccaagcagcctgaaaaccggtcgctatcactttgagcagtccaccgtgacttctcagccggcacgctaagacaggagtcgtcaaatgatcgattatgaagtactacgttttatctggtggctgctggttggcattttgctaattggtttcgctgtcaccgatgggttcgacatgggggtggggatgctcacccgtttcctcggtcgtaacgacaccgaacgtcgaattatgattaactctatcgctccacactgggacggtaaccaggtgtggttgatcaccgcgggcggtgcgttgtttgctgcctggccgatggtttacgccgcggcgttctccggtttctatgtggcgatgatcctggtgctggcgtctttgttcttccgtccggtcggttttgattaccgttccaagattgaagacccgcgctggcgcaacatgtgggactggggcgtgttcatcggtagctttgtgccgccgctggtgattggcgtggcctttggcaacctgttgcagggcgtaccgttccacgtggatgagtatctgcgtctgtactacaccggtaacttcttccagttgctgaacccgtttggtctgctggcgggtatcgtaagcgtagggatgatcatcacgcagggggcgacttacctgcaaatgcgcaccgttggcgaactgcacctgcgcgcgcgcgccacctcgcagattgcggcgctggtgacattagtgtgctttgcgctggcgggcgtttgggtaatgtatggtattgatggttatgtcgtgacatccgcgattgatcatcatgccgcctctaacccgctgactaaagaagtggcgcgtgaagctggcgcctggctggtgaactttaataatgctccgatcctgtggttggttccggctctgggcgtggttctgccgctgctgactatcctgacttcccgtatggagaaaggcgcgtgggcattcctgttctcttcgctgaccctggcctgcattattctgacggcgggtatcgctatgttcccatttgtgatgccgtccagcacgatgatgaatgccagcctgaccatgtgggatgcgacatccagccagatgacgctgaacctgatgacctgggttgcggcggtgttcgtaccgatcattctgatctacaccagctggtgttactggaaaatgttcggtcgtatcactaaagaacatattgaaagcaacacccactctctgtactaagtaaggagcttaaaatgtggtatttcgcatggattctgggaacgcttcttgcctgtgcattcgggatcattaccgccctggcgcttgagcacgttgaagcgggtaaaaccggtcaagaagaaagctaatgattcatattgtcgctatgcaatatacaaaatcatttaagttgcatcgcggcggcaaggctgcgaatccccaggagcttacatcagtaagtgactggggtgtgcagccgcagccaacaaagaggcagcttagaggatgaagtatatttatgcggtaatggacaagcgcccgttaagggcgctttccttcgtgatggcgatagtgctggcaggatgtatgttctgggacccgtcacggtttgccgccaggaccagcacgcttgaaatctggcacggattattgctgatgtgggcggtttgcgcaggcataatccacggtgtgggttttcgccctgaatccgtacactggcaagggattttttgtccgctccttgcggatatcgtccttatcgtcggcctgattttcttcttcttgtgaataagaaacctccttaaaaatataggggcttgcataagcccatatatttttactctcccttaacttccccccattcccaagcctcattcccacgcgtatagtagcaacgtttaaaagctctacttttgttgcattaccgggatgtaaagtgaatacaaggcgatatacaacggcattcttgaggcattacggcggcaagcggatgacgccaacaaagaggctgcagggatgaataagtatatgtttcgatggccaattcgagtttattacgaagacacggacgccggcggtgtggtttatcacgccagctatgtcgctttttatgaaagagcgcgcacggagatgctgcgtcaccatcacttcagccaacaggtgctgctggcggagcgggtcgcctttgtggtgcgcaagatgacgctggaatactatgcgcctgcgcggctcgacgatatgcttgaagttcaaacagaaattacgtcaatgcgtggcaccgctttggttttcacgcaacgcattgtcaacgcagagaacacgctgctaaatgaagcagaggttctgattgtttgcgttgatccactcaaaatgaagcctcgtgcgcttcctaagtctattgtcgcggagtttaagcagtgactgacatgaatatccttgatttgttcctgaaggcaagccttctggttaaacttatcatgttgattttgattggtttttcaatagcatcctgggccatcattatccagcgaacgcgtattctgaacgccgctgcgcgtgaggcggaagcgtttgaagataaattctggtccggaatcgaactatcgcgtctgtaccaggaaagccaggggagacgcgatagtctgtcgggctcggaacaaatcttttatagcgggttcaaagagtttgtccggctccatcgcgccaacagccatgcgccggaggcagtggtagagggggcgtcgcgtgcgatgcgcatctccatgaaccgagagctggaaacgctggaaacgcatatcccgtttcttggcacggtaggctctatcagtccttatatcggtctgtttggcaccgtatgggggattatgcatgcgtttatcgccctgggcgcggtgaaacaggcgactctgcaaatggttgcgccgggtattgccgaagcattgattgccacggcgattggtctgtttgccgccatccctgcggttatggcttacaaccgactgaatcagcgcgtgaacaagctggaactgaattacgacaactttatggaagagttcaccgcgattctgcaccgccaggcgtttaccgtaagcgaaagcaacaaggggtaagccatggccagaacgcgtggacgaggtcgtcgcgaacttaagtccgaaatcaatattgtaccgctgctcgacgtactgttggtgctgctgctgatctttatggcaaccgcgccgatcattacccagagcgtggaagtcgacttgcccgaggcgaatcagtcgcaggcggtcagtagtaacgacgatccaccggtcattattgaggtttccggagtagggcaatacagcgtagtggttgataaagatcgaatggatcaactgccgtctgaacaggtgatcgcagaagtaaagcgtcatctgcaggctaatccgaaaacagtctttttaatcggcggcgcgaaagaggtgccgtacgatgaaataattaaagcgctgaacttgttacacagcgcgggcgtaaaatcggttggcttaatgacgcagccaatctgaagtctgcgtcccgttggcttgaaagacggcgagtaacaggcgaacagttttttgggaaccgagagtgtcaaaggcaaccgaacaaaacgacaagctcaaacgggcgataattatttcagccgtgctgcatatcatcttatttgcagtgctgatctggagttcgtttgatgagcatatagaggcttctgccggcggcggcggtggttccgctatcgacgcggtgatggtcgatcctggcgccgttgtgcagcagtacaaccgtcagcaggatcaacaggccagcgccagacgcgcggaagaagagcgtaaaaagctgcaacagcagcaagcagaggagctgcagcagaagcaggctgctgaacaggagcggttgaaacaacttgagaaagaacgtttagcggctcaggagcagcaaaagcaggctgaagaagcggcaaaactggcgcaacagcagcagcaacaggccgaagaagcggcgaaagcggcggcggacgcgaagaaaaaagcggaggccgaggcggcgaaagcggcggcggacgcgaagaagaaagcggaagccgaagcggtaaaagcggcagcggacgcgaagaagaaagcggaagccgaagcggcgaaagcggcggcggacgcgaagaagaaagcagaggccgaagcggcgaaagcggcggcggaggcgaagaagaaagcggaagccgaagcggcgaaagcggcggcggaggcgaagaagaaagcggatgccgaggcggcgaaagcggcggcggaggcgaagaagaaagcggatgccgcggcggcgaaagcggcggcggaggcgaagaagaaagcggatgccgcggcggcgaaagcagcggcggacgctaagaagaaagcggctgccgaaaaagcggccgccgcagaaggcgtcgacgatctgcttggcgatctcagctcgggtaagaatgcgccgaaaaccggcggcggcgcgaaagggaatggtcagccatcgaaagatagcggtacatcgggcgctaacggtggggcgacaggcgctgatatcagcgcctacgcgaaacagattcaggtcgccattcagagccgtctgtacgatgcgagcctgtatcagggcaaacaatgtgtcttgcatattagcctggcgccggatggctcattaaaaagcattacgtctgagggcggcgatccggcgctttgtcaggcggcgttaatggcggcaaaaaccgcgaaaattcctaaaccgccaagccaggctgtttatgagaaaataaaggatgccaaactagactttaaactgtagatacttttctttatggaagttagagcagttgagttgttactggtcctggtggttttgtgtatttgagtttgttaacattctgctaaattatcgtgggtcgcaggcccaggtatgggagatatgatgaagcaggcattacgagtagcatttggttttctgatgctgtgggcggcggtgctgcacgcagaagtccgtatcgagatcacccagggggtggactcggcgcgaccgattggcgttgtgccttttaaatgggccggaccgggcgctgcgcctgaagatatcggtggcatcgtggcggcagatttacgcaatagcggtaaatttaatccgctagaccggtcccgactgccgcagcagccagccaccgctcaggaagttcagcctaccgcatggtctgcgctgggtattgatgccgtcgtcgttggacaggtaacgccgaatccggacggttcctacaatgttgcttatcagctggttgacactggcggcgcgccggggactgtactggcgcaaaattcttataaagtgaacaagcagtggctgcgttatgcaggtcataccgccagtgacgaagtctttgaaaaactgacgggcattaagggcgcgttccgtactcgtatcgcctatgtggtacagactaatggcggtcagttcccgtatgaactgcgtgtgtcggattacgatggttacaatcagtttgtggtgcaccgttctccgcagccgttgatgtctccggcgtggtctccggacggctcaaaactggcttacgtgacatttgaaagcggtcgctccgcgctggttatccagacgctggcaaacggcgcagtgcgtcaggttgcgtccttcccgcgtcacaacggcgcgccggccttctcgccggatgggacgaaactggcgttcgcgttatcgaaaaccggaagtctgaacctgtacgttatggatctcgcctccggtcagattcgtcagataacggacggccgtagcaacaatacggagccgacctggttcccggacagccagactctggcctttacctctgaccaggctggacgtccgcaagtgtataaaatgaacattaacggcggtgcggcgcagcgtattacctgggaaggttcgcaaaaccaggatgcggatgtcagcagcgacggtaaatttatggtaatggtaagctcaaataacgggcagcagcacattgccaaacaagatctggtgacgggtggcgtacaggttctgtcgtcaacgttcctggatgaaacgccaagtctggcacctaacggcacgatggtaatctacagctcttctcaggggatgggatctgtgctgaatttggtttctacagatgggcgtttcaaagcgcgtcttccggcaactgatggtcaggtgaaatcgcctgcctggtcgccgtatctgtgataataattaattgattactaaaggaattaaagaaatgcaactgaacaaagtgctgaagggcctgatgattgccctgcctgttatggcaatcgcggcatgttcttccaacaagaacgccagcaatgacggtagcgaaggcggtatgctgaacggcgccggcactggtatggacgctaacggcaacggcaacatgtcatctgaagagcaagcgcgtctgcagatgcagcagctgcagcagaacaacatcgtttacttcgatctcgacaagtacgatatccgttctgacttcgcggcaatgctggatgcgcacgctaacttcctgcgtagcaacccgtcttacaaagtcaccgtagaaggtcacgcggacgaacgcggtactccggagtacaacatctccctgggtgagcgtcgtgctaacgccgttaaaatgtacctgcagggtaaaggcgtttccgctgaccagatctccatcgtttcttacggtaaagaaaaacctgccgtactgggccacgacgaagcggcttacgctaagaaccgtcgcgctgtactggtttactaagagaattgcatgagcagtaacttcagacatcacctgttgagtctgtcgttactggttggcatagcggccccctgggccgcttttgctcaggcgccaatcagtagtgtcggctcaggctcggtcgaagaccgcgtcactcaacttgagcgtatctctaacgctcacagccagcttttaacccaacttcagcagcagctctccgataatcagtccgatatcgattctttgcgcggccaaatccaggaaaatcagtatcaactgaatcaggtgatggagcgccagaagcaaattatgctgcagctggggagcttaaataatggcggcgcagcgcagccagcagctggtgaccagagcggggcggcaaccactgcgacccccgccccggatgccggtacggcaacctcaggggcgccggtacaaagtggcgatgcgaataccgattacaatgcggcaattgcgctggtgcaggataagtctcgccaggatgatgcgattgtggcgtttcagaacttcatcaagaaataccctgattctacttatcagccgaacgccaattattggctgggccagttgaattacaacaagggtaaaaaagatgacgccgcctattatttcgcctcggtagtaaaaaactatcctaagtcgccgaaggctgcggacgcgatgtacaaagttggcgttatcatgcaggacaaaggtgatacggcaaaagcgaaagcagtttatcagcaggtgattaacaaatatccaggcactgatggcgcgaaacaggcgcagaagcgtcttaacgcgatgtaatgcgtaccatgcgaccagaaaacgccttttttctggtcgcgtcgtgcgattcctaagcagttgagccctctgcgtcgaaatttttgttgcgctcaaatctgaaatcagtaatatatgccgccgttgccacgggatattaaacaactcgaaagcaacgcaaaagtgggtcgttagctcagttggtagagcagttgacttttaatcaattggtcgcaggttcgaatcctgcacgacccaccaatcgttcggtggaaacgagaataaaacgtgaaggataacgttgcgtcagcaacggcctgtagggcgaggcgaagccgagtcatcctgcacaccactaacttcggttagtcagtaatatccagcgtagtatcgggtgattagctcagctgggagagcacctcccttacaaggagggggtcggcggttcgatcccgtcatcacccaccactcgggtcgttagctcagttggtagagcagttgacttttaatcaattggtcgcaggttcgaatcctgcacgacccaccaattttctaattggtgccgagtaaaaatatttcaggtagtcccaccgtatgggtcgttagctcagttggtagagcagttgacttttaatcaattggtcgcaggttcgaatcctgcacgacccaccaatatacaaggtggtaactggtagagaacgtgaaggttaacgttgctttagcaacggcccgaagggcgaggcgaagccgagtcatcctgcacgacccaccatcctgaatgattgaagcagtaacccttatccaaggggtcgttagctcagttggtagagcagttgacttttaatcaattggtcgcaggttcgaatcctgcacgacccaccaatgtaaaaaagcgccctaaaggcgcttttttgctatctgcgatatggaagattcgaacctgccgcaggttcgggtctcacgtagtgagacaacggagccgcttgcggcgacggcccgaagggcgagcaaagcgagtcatcctgcacgacccaccaatgtaaaaaagcgccctaaaggcgcttttttgctatctgcgatatggaagattcgaacctgccgcaggttcgggtctcacgtagtgagacaacggagccgcttgcggcgacggcccgaagggcgagcaaagcgagtcatcctgcacgacccaccaatgtaaaaaagcgccctaaaggcgcttttttgctatctgcaatatgaagattcgaacctgccgcaggttcgggtctcatgcagtgagacaacggagccgtttacggcgacggcccgaagggcgagcgaagcgagtcatcctgcacgacccaccaatgtaaaagagggcgctggcggcgcctttttgctatctgcaatatggaagattcgaacctgtcgcaggttcgggtcttgcctgatgcgctgcgcttatcaggcctacagacggcaccgctcacgtaggccagataagacgttacgccgccatcagatacggggctacgtaattattgtgactttccttattgaatcagctatcttgtttagcatataaaacaaattaaccgattgtggcgtttattacgctttcattcggttgtttcgttaagtcagtaaaacgagaagccacgatgagcgtaatgtttgacccacaagccgcaatctacccgttcccgccgaaaccaacgccgttgaacgacgacgaaaagcaattttatcgtgagaaaatcaagcggttgctcaaagagcgcaatgccgtcatggtggcgcactactacaccgatccggaaattcaacagttagcagaagaaaccggcggctgtatttccgactcactggaaatggcccgtttcggcacgaagcacgccgcatccacgctgctggtagcgggcgtacggtttatgggggaaaccgccaaaatcctcagcccggaaaagaccattcttatgcctaccctggcggcggaatgttcgctggatttaggctgcccaatagacgaatttagcgctttttgtgatgcgcaccctgacagaaccgtagtggtctatgctaacacctcggctgctgttaaagcgcgtgcggactgggttgtgacctccagtatcgccgtagaactgattgagcatctggatagtttgggggaaaaaattatctgggcgccggacagacacctggggaattacgtgcaaaaacagaccggggccgatgtactgtgctggcaaggagcgtgtatcgtgcatgacgagtttaaaactcaggcgttgacccgtttaaaaaaaatctatcccgatgccgctcttctggttcaccctgaatcgccgcagtccattgtcgagatggccgatgcggtgggctccaccagtcagcttattaaggcggcaaaaacgctgccgcacagacagcttatcgtggcgaccgatcgcggcatcttctacaaaatgcagcaggcggtgcctgaaaaagaactgcttgaagcgcccacggctggcgagggggcgacctgccgtagctgcgcgcactgtccgtggatggcgatgaatggcctgaaagccattgctgaagggctggagcagggaggcgcggcgcatgaaatacaggttgatgcggcgctacgcgagggcgcattactgccgctcaaccggatgctggattttgcggctacacttcgggcgtaaagacggaaatctttgggggagagaatggatttttttagtacgcacaacatactgattcatattccgattggcgctggcgggtacgatctctcgtggatcgaagcggtaggaaccatcgccggcctgctctgtatttggcttgccagtctggagaagatcagcaactacttttttggactggttaacgttaccctgtttgcgattattttctttcagatccagctttatgccagcctgttgctgcaactctttttctttgccgccaatatttatggctggtatgcgtggtcgcggcaaacaaaggataatcaagccgagcttaaaatccgctggctgccgttgccaaaagcaatggcatggctggcgatatgtgtgatagctatcggtttgatgacgcgatatatcgatcccgtattcgccgtcctgacgcgcgtggccgtcgccattatgcagatgctggggttacaggtgacaatgcccgtactgcaaccggacgctttcccgttctgggactcttgcatgatggtgctgtctatcgtggcgatgattctgatgacacgcaaatatgtcgaaaactggctcctgtgggtgataatcaacgtgatcagtgtggtgatttttgctttgcagggcgtctatgcgatgtcgctggaatatctgatcctgacatttatcgccgtgaacggtagccgcctgtggataaacagcgcgcgggagcgaggatcgcgcgcgctttcccgttaatggtgatgaacatgcccggacgatgtctgattcagatgacagtccgggccgtgacacacttgatactccatctgaatcgtagcgtgcgcaatatggtattcgtgcatcaggaaatcctggatacgttccagcagcgcatcatggtcgtgtggcggaatgacctgagcgtgcaacgtcatgaccggtttttcgccgaccatccagacatgcacatggtgtacgttgcggacttcggggatttcccgacttaaatggcgctgtaaggcattaatatccagtgaaaccggcgcgccttccagcaattcgttgacgctatcttttaacaaacgccaggcgctgcgtagcaccagtaccgaaaccagaatagagagaatcgggtccgctggcgtccagcctgtccagataatgatcaacgcggcgactattgcgccgacggaacccagcaaatcgcccatcacatgtagcgcggcagcgcgcacgttcaggtttttttcatcgcttccccgatggagaatccagaacgcaaacaggttcgccagcagacccgcaaccgcaatcaccatcatcagattgcccgccaccggacgtggcgtgtaaaagcgctctatcgcttcccagacaatgagaagggtaatgaccaccaacgcaatggcattcacaaaggccgccagtgtggtgagtcttagccagccaaaagtgtggcgaacagtcgggggacgacgggaaaattgaaccgccagcagcgcaaagagaagggccgccgcgtcggtgagcatatgtcccgcatccgccaacaacgccagagagccggagagtatcccgcccaccacctcaaggagcataaatccggcagtgacgataaaggcgaaaagcaggcgacgagcattattatctttcggcaggtgtgaatcggcatgagagtgtgagtgcgccataacgtcattcctttgttattctcatcaatactgtagacatcatactgatttttcgctgataaaataaaaaggagagcgaaagctctcccgttatcagacttttttttgcattactgtgtggtaccgtcggttttggtattcacgtcattattgacgccattaccggtttccacttttttattaatatccgggcagcgaccgtctttacacatggtatttttatgctcttcatccttggtcattccgtcatgattcatggttgaaccgtctggatgctgcatcgtgctgttagtattgccgttggtattgatgtcgttgttattcacatcattcggcgctacattctggcgggcgtccggggcaacctgaccggcatttgccgccgagttcgcctggccattactggattgcgcgttagattcagcagctaacgctgcgccgctggcaaggccgagggtagcggtcagtaaaagcgtagtcagttttgtcattttcataagatgctcctgttatggtggatatgtcggataacctcttccaacagtgcacgtgtcagtcaaatcctcaaataagggataaaaagcgttcgccgccgcgggttaacgcagcagagaatcttgcaataattcataaacagagtggttacagttaaaaagtgtagattagatcccatttttcgctacatttgtgcgtttttttcctgaattccaggattattccgttcaaagtgtaaaagcccgtttacactatttaattgaagagatagattggagggattgcattcattgggataagtacggcaacactggaataaacatgaattatcagaacgacgatttacgcattaaagaaatcaacgagttattacctccggtcgcgctgctggaaaagtttcccgccacggaaaatgcagcaaataccgttgctcacgcgcgcaaagccatccataaaattctcaaaggcaatgacgatcgtctgctggtggtgatcggtccttgttcaattcatgatccggcagcggcgaaagagtatgccgcccgtttgctggcgctacgcgatgagcttcaaggcgagcttgaaattgtcatgcgcgtctattttgagaaaccgcgtaccaccgtcggctggaaagggctgattaacgatccgcacatggataacagcttccagattaacgacggtctgcgtattgcgcgcaaactgctgctggatattaacgacagcggcctgcctgccgccggcgaattcctcgatatgatcacgccgcaatatctggccgatctgatgagctggggcgccattggcgcgcggactactgaatcccaggttcatcgcgaattggcgtctggcctctcttgtccggtcggttttaaaaatggtactgatggcacgattaaagtcgccattgacgccatcaacgccgccggcgcgccgcattgcttcctctccgtcactaaatggggtcattcggcgattgtgaataccagcggcaacggcgactgccatatcattctgcgcggcggtaaagcgccaaactatagcgcgcagcatgttgctgaggtgaaagaaggcctcaccaaagcgggactgacgccgcaggtcatgatcgatttcagccatgccaactcctgtaagcaatttcaaaagcagatggaggtttgcgccgatgtctgccagcagatagcgggcggtgaaaaagcgattattggcgtgatggtagagagtcatctggtagaaggaaaccagagtctggaaagcggtcagccgctgacctacggtaaaagcattactgacgcctgtattggctgggaagataccgatgcgctgcttcgtcagttgtcggcagcggtaaaagcccgtcgcggctaagtttagtttctatcctgtagtgaagtgcaggatagaaaacatattggtccggtaacagcctaccggaccggtattaccaatattaatgtattattatttggcgtacttaggtacttcctgcttctggagagtatttccttccgaatcaattcctacaatgactctatagcggtcaaaatataacttcttaatggattctgttcctaattcttcgtaggcaacaatttctactgatttaacatgttttgtattaattgcagacgctcctccaatcccgagtagcgaaaccccaccgtattttttacaaagctcagcgacataatcagcacgatcgcctttgccaagaaacgcagttgccccttgttgaaacatcatttctacaaatgggtccatacgcgcggccgttgtaggaccgttggagccaataggtaaaccaggtctggcagggcaggggccagcatagtaaattgtttggttttgaaaatcgactggtgatttttctccgttactaagcgctacttcgatttttttatgcgcggcgtcacggcaggtgtaagcaaatccagtgagaaataatatatcgccgaccttaagagttttcgctttctctttagtcaatggtaatgttaattccatcatagcttctccaggtattaaatgatttcactagcgtggcggcttgcattacattggaaattgattgcgactggcagtgcagtgatatggcaaggatagtaatcgacatgcacgcctaacgccgtaatacgcccgcccatacctaaagggccgatccctgtattattcacggcctctaataattcagcttcgagctgggcataaagtggtttagcattgaactcaccaagagggcgtaataatgctttcttcgccatccacgaacagtgatccattgtaccgccaacgccgataccaataatataaggagggcatggattgcctcctacacgacggacagtttccagaacaaaatcttttataccatcaataccatcgccgggaagcaatgttttaaaagttcccatattttcgctaccgccgccctttggcataacggtaattgtcactcggtcaccatcaacaatttcagtatgtaaaattgcaggagtattatcattagtattaatacgttctaatggatctgcaaccatggattttcttaagtatccattttcatagccctggcgaacaccctggttcacctgatctttaagcggcttaccttcccagcatacatgttgtccaatttccattataacgatacaagtgccggtatcatggcagcatgcaagttgttctttttttgcatactctccattatcaattaatatcttaatggtttccttgccgatctttgactcttctttatcatatgctttacgaaaagaacacatgagattatcatccagttcataacaagctttttttacaagtttttcgataatcggaatgataatttctgtatttaatatacgactcatactccctccagtgctatgttgcattgttttatccattgatcacattttcatgatattcgtattcattgtaggaaggaaatatgttatttttattaaatgataaattttatttatagtagtggaaaatagatggaaattagacaattagaatattttgtaagcgcttctttgttaggtaacttaaccagagttgctgagcggcattttgtttctcaacctaatatcaccattgctattaagaagttagagactgaattaggggtgacattatttgatagaaagaaaaataaacttgtccttactgaggagggcatgtttttcttacaaaaaattgaacctatccttattgcgttaaaaaatagcgtagcggaaatgaaagattatcgtaatgaaaatggtggcatagtaactttggggatcccaccgatgataagtttgtttcttttttcaccgctcttcaagcatttccgagagatttatccagagatggaactctctcttgttgaagaggggacttttggtttacatgataaactttctgctggagagctggatcttgctattgttattattaatgactgtccaaaagaattagttacggtaccattaatgactcagcagcacgtggtatgtatgtcagataaacatcctctggcaaaaaaggatagtatcgattgggaagatctacaatatgagccattgatactaatgaaaaaagattcctggcatagaaaaacgattattgaagaatgtacaaagcgaggaattcatacacatatttttctatcatcaaacagggttcaaaccaacatagatctggttgctaaaaatgaaggaatttctttcattttggacgctgtcgatcttaaagccgaaaaagtaataaccaaggccatgactgagccgacttatgttacgattggtttggcctggaagaaagataaatatttatcatatgcaaccagagcgttaattaaattcattgaggattatattaaagaacattttacaattaaataattatatttgttcttcaacaaaaatttcccatagctcttcggcatctggaggcattctcttggctggtctataaagtcttatttctatgggtacccataaattactttctttttccgctgcagtaacaatagttttagcctctatatcttgcctggcaaggctttgaggtatccaggcaacaccatcgccagatctgaccattgccaatagtgttgctgccagatcggccacaaaggcaacatttatattatgggtaattctgttaatagacgctgtatttgctattattcttcccagacctgattgtgatgaaaaagaaaggtaagggaattgaatcttattatttatattccacaacggttttaacgtttctgagtctggtttactgaatggaattaatgtatcaaacccaagacgaatgctcataaagttatttttatttaaatttagatgcatatgtgggtgatggtgacacagcaaaaattgtgaatctccctgccgcatcattttttcgcacgcattcaatgagtcagataaaagacgaaatgaaccaaattttgcaattttatcactctgttttaacaaatgcggtacaaaagagaaagacaaagcatgcgttgctgaaaaaacaagactgggttgtttattacctgcggcctcaagggtatcacttttcaatgtgtacaaggagtggatcagttcgggaagctggtctgtaaatacttctccggccttggtaagggtgactccccgtttacttctttcaaaaaggggcgtacccacccattcttcgagagattgtatccgacgactaaatgcgggttgagtcacatatcttgaggcagacgcttttgagaaattcaacgtttcttttagagccagacagtcttcgagccatgttagttcgaggtgatgccgatattgcataagctgcaaccttattagcattggatgagtttcatttatataagtagcattatacacagacagattttaagaggaaattatttgattaaacagaaacaaaagcagtaagaatatgttatgcctttgtcgggtaagtgttgttatttatgtgagtgtattctttctcaatagaaattaattagatgtaattttagtataacatgtgatttatgcttgttgcagttgtattcatgactgtaatgagttgtttttgtaccctaataatataaggacgtatacatgtcaccagcgattattactttgttggttttagtggttgcaataattatctttgttagcgatcgtcttcctatgggattagttgcatttatggtcccaatggcactttattttaccggtgttatcgatgctaaggatatttttgcttcaatcgtaaatgcgaatgttattcttatcgtcgccatgtgtgtactcggtgcggcattttttaaaacaggtttggcatggcaatcaagtaaaattttactaaaatatgctaaaacagaaagaagccttagtgtattgatttttcttattggtggagttatgtctgcctttgtttctaatagcggaacagttgctgtgctaattcctattgttttaggtattgccgccagtagtcagattaagcctattaaacttcttatgcctctggtttttggggcaacaatcggtgctgatatttctattatcggttcgccaggaaatctgattgctaaaaatactattgaaacttttagtaagggaagtctgtcggtgccatttttcgaatacgctaaaattggtattcctttgctgattgcatgctctatatttctctatttcttcggttcaaaactcatcgcagatcgtgatggaaatacacaatctgattctcaaatggattatagccaaattccggcctggcatagaaatttaactttagccgtttttattctgtctatcgctggaatggtggcaactgattatattaagtttctgcctccaatgcatattattgcgtgttgtgcggctattgttcttgtatttgctggcgttttgacacaaaaggaaacttttaattcttttgaaacactaactgttttcatgcttgcgtttatgatgcctttaggagccgcgcttaattctactggtgctggagaaatgattgctaatgccgttatttcagtaaccggagattctggcgttatgattattatggcgtcattgtggatacttacatgggctttgactcaagttatgagtaacactgcagcatgtacgttgttatgcccggtaggatggactatcgcacagtctattggcgcagaccctcgtgcagttgttattgctgtttttattgcgagtagtgttgctgtttgtaccccaatggctattacagcaaactcaatgattattggcccggggaatgttaaatttaaagattttttaaaacccggattggcgattagtttggtttgttttatcgttagtatgattttactaccgatattttatcccttctattaatgcctgatattacttttctattttagattattaaatttgagactttattatgaatagttcggtgctattaggtgaaggcttcaccctgatgttcctcggcatggggttcgtgctggcgtttctgttcctgctgattttcgccatccgcggcatgtccgccgccgtcaaccgcttcttccctgaaccggtcccggtaccgaaggcggcacccgccgccgcgcccgcggacgacttcgcccgcttaaagccggtgattgccgccgctatccaccaccatcgccgccttaacccttaattcacggaggaatccatgaccgttgccattaccgatgtcgtcctgcgcgacgcccaccagtccctgttcgccacccgcctgcgccttgacgatatgctgccgattgccgctcagctcgacgacgtgggctacggctccctcgaatgctggggcggcgccacctttgacgcctgcatccgctttctcggcgaggacccgtggctgcgcctgcgcgagctcaaaaaagccatgccgaagactcccctgcagatgctgctgcgcggccagaacctgctcggctatcgccactacgccgatgacgtggtggaacgcttcgtcgaacgcgccgtcaaaaacggcatggacgtgttccgcgtcttcgatgccatgaacgacccgcgcaatatgaaaccgccctgcaggcggtgcgcagccacggcgcacacgcccagggcacgctctcctacaccaccagcccggcgcacaccctgcagacctggctggatttaacggagcaactgctggaaaccggcgttgactcgattgccatcaaggatatgtccggcattcttacaccgatggcggcgtatgagctggtcagcgaaatcaaaaaacgttttgaggtacgcctgcacctgcactgtcatgccaccaccggcatggcggagatgacgctgctgaaagccattgaagcgggcgtcgacggcgtggacacggcgatttcctccatgagcgccacctacggccacccggccaccgaagcgctggtggcgacgttggcaggtactgagcacgacaccgggctggatatcctgaagctggaaaatatcgccgcctacttccgcgaggtgcgcaaaaaataccacgcctttgaaggccagctgaagggctacgacagccgcattctggtggcgcaggtaccgggcgggatgctgaccaacctggaaagccagctgaagcagcagaacgcggcggacaaactcgaccaggtgctggcggaaatcccccgcgtgcgcgaggacctcggctttatcccgctggtgacccccacctcgcagattgtcggcacccaggcggtgctcaacgtgctgacgggcgaacgctacaagaccattgccaaagaaacggccggcattctgaaaggcgaatacggccacacgccggtgccggtgaacgccgcgttacaggcccgcgtgctggaagggggcgctccggtgacctgccgcccggcggatttactcaaaccggagctggctgaactggaagcggacgtcaggcgtcaggcgcaggagaagggcattactctggcgggaaacgccattgacgacgtgctcaccgtggcgctgttcccgcagattggcctcaaattccttgagaaccgccacaacccggcggcgtttgagccactgccgcaggcggaagccgcgcagccggtggcaaaagcagagaagcctgcagcttccggtatctacaccgtggaagtggaaggcaaagcctttgtggtgaaggtcagcgacggcggcgatatcagccagcttactgcggctgttccggcagcctcttccgcaccggttcaggctgccgctcccgcaggcgccggcaccccggtcaccgcgccgctggcgggcaacatctggaaggtgattgccaccgagggccagacggtggccgaaggcgatgtgctgctgattctggaagccatgaagatggaaaccgaaatccgcgccgcgcaggccgggacggtacgcggtatcgcggtgaagtccggcgatgcggtctccgtcggcgacaccctgatgacgctggcgtaaggacgaggagcggaaatggaaagtctgaacgccctgcttcagggcatggggctgatgcaccttggcgcaggccaggccatcatgctgctggtcagcctgctgctgctgtggctggcgattgcgaagaagttcgagccgttactgctgctgccgataggcttcggcgggctgctgtcgaacattccggaggccgggctggcgctgaccgcgctggaaagcctgctggcgcaccacgacgccggacagctggcggtgattgccgcgaagctccactgcgcgccggacgtgcatgccattaaggaagcattagcgctggcgctgccctccgtccagaaccagatggaaaatctggcggtggacatgggctacacgccgggggtgctggcgctgttctacaaagtggcgattggctccggtgtcgcgccgctggtcatcttcatgggcgtcggcgcgatgaccgacttcggcccgctgctggccaacccgcgcaccctgctgctcggcgcggcggcgcagttcggtatcttcgccaccgtgctgggggcgctgacgctgaactacttcggccttatcagcttcaccctgccgcaggcggcggccatcggcattatcggcggcgcggacggcccgacggcgatttatctgtcgggcaagctggcgccggagctgctgggggccatcgcggtggcggcgtactcgtatatggcgctggtgccgttaatccagccgccgattatgaaagcgctgaccacggagacggagcggaaaatccgcatggtgcagctgcgcacggtgagtaagcgggaaaaaatcctctttccggtggtgctgttactactggtggcgctgctgctgccggacgccgcgccgctgctggggatgttctgctttggcaatctgatgcgcgaaagcggcgtggtggagcgcctgagcgacacggtacagaacgggctgattaatatcgtcaccatcttcctcgggctgtcggtgggcgcgaagctggtggcggacaagttcctgcaaccgcagacgctgggcattctgctgctgggggtgattgcgtttggtatcgggacggcggccggggtactgatggcgaagctgctgaacctgtgcagtaagaacaaaatcaacccgcttattggttcggcgggggtgtcggcggtgccgatggcggcccgcgtatcgaacaaggtgggcctggagtcggacccgcagaactttctgctgatgcacgcgatgggcccgaacgtggccggggtgattggctcggcgatagccgccggggtgatgctgaagtacgtgctggcgatgtaaatctgttcctttcccggaggcggcgcgttgcgcctgtccgggctaccggattgcatggatctgtagcccggacagatgcgcagcatcgtctccgggaatgtcccataaggagactttgatgaatgaaaccatagcatttcgtccggaaggccgggcatcgataaaagatgtggttgtcaattatacgctggcatcactggacgagcttgaacaactgcacccggcgctgaatctgctggcgcacccgtcaattgtccgtggcagccatgatttctttgtccgttgttatgacgcgggcgtacagcatgcgcaggccggggcggctgaaacggtagcggttttgcctgattcgctgccacaagaacggcaaaggagcgggctgctgtgtgccgcagcaggtcgtctggatgccctgcgccagccgctgacgcacaatcgtttatgtgacctggccagtcagttctgtgctggcatggcagatgttgacagcgaaacccgcagcggtttttataccgtgcgcagcatatcgctgccggtttaccggcggctgttgcgggatcaacattctcacggtgtctgcctgcagcaggctctgctgcacctgctggcctggaagagcgattctccctgggcgcggcagcaggcgcagcggctgctctggcagggcggcgtgctgggcgataaaggtgagtttgcgcttatgacgctggatgatgaactgcgggagcgccagattgggtggcccgggctgtggtcgctgctggccgtcaccgggtttctggcgaaattccctgccggaccgatatttgctgactgaaaaatgaggactgctgacaattatctgttgtgttggcatttctgcgagaggcagctagcgctttgcctgacttacgaaacgagaatatcaacagattacgtactttttgtaggtccgtggttggaacattgccacctggttacacgttgtcagcagcctcaagcgtggatggctccacgctgtctttgtctatggaaaacccccagtcaggccctgtctcttgatcaggagatctgatcaagagacagggctatgccggaggatatttattggaaaccgatgagataggccaccgtgtcattaatcgaaatataaataaatatataacgaaataattcggcgctataattctcctctgattaataacgtagcccgaaccatgacctgtcaggacaaatcacttttagcccccgctctcgcttccacgcccgtcattccgcgctatcgccagatcatacgcaaacgggctgtgctcatgttagctattgcgttggcgatgatggcttcactgatggtggatgtaacctgtgggtcttctggtttaccgctcagtgcgctatggcaggcgctttttcaaccggaaaaagtgaatgcgggcatacacgttattgtctgggatattcgtttaccctatgccctgatggccctactggtgggcatggcgttagggttagcgggcgccgaaatgcaaaccattttaaataatccgctggcgacgccgtttaccctcggcgtatcgtccgcggcggcttttggcgctgcgctggcgattgtgttggggatcggtattcccggtattcctgccgcctggtttatcccggccaatgcgttcatctttgcgctgttatccgcgttactcctggacggtattacccgttggacaggcgtcgccgcatccggagtggtgttgtttggtattgcgctggtattcacctttaacgcgttggtcgccattatgcagtttgtggctgatgaagatacgctgcaggggctggtattctggacgatggggagcctggtccgcgcgtcgtgggaaaaattgggcgtactggccgtggtgtttattgctgtgcttttttgcgcgttacgaagcgcctggcaactcacggcattacgtctgggcgaagagagggcgatgagctttgggattcatgtccgccgtttacgcctgctgtcattgttgcgtatcagcttgttatcagcgctggcggtagctttcgtcgggccgattggttttattggtctcgttgcgccgcacattgcgcgaatacttttgggggaagatcaccgtttctaccttccgggcagcgtgctgataggcgggctggtgttatcgctggcctctattgcggcgaaaaatagtattccgggcgtcatggtgccggtggggattgtcacctcgctggtcggggttccgttctttttaagcattgtattgcgacatcgggggagtctctgatgcgcgggttaatgctccgctcatttagcgccggctattccactcagccggttattgcagatctcaacgttcccttactgccgcgcgggaaaattaccattttgctggggccgaacggctgtggtaaatcgacgttactacgttcgctggccgggctgaataacgccgacggcgaggcgctgcttgatggcgaagatctcatgtcgttatcgtttgccgagcgggcgcagaaagttgtgtttttgccgcagtcattaccgcagggcgtacatctgcatgtactggagtcgattatcgtggtactgcgggcatcaggcggcagagacaatgcgcagggcagagcgcagatactggctatccttgagcaattgggcataacgcatctggcgttgcagtatctcgaccagctttccggcggtcagcggcagttagtgggtctggcgcaatcgctgattcgtcgccctgaacttctgttgctggatgagccgctcagcgcgctggatttaaactatcagtttcacgtaatggatctcgtgcgtcgggatacccaggcgcaaaatagggtaacgatagtcgtggcgcatgacattaatattgcactgcgtcatggtgaccatgtcctgatgctaaaagacggcaggctggtcgccagcggcgcgccggagacggtgattactgcggagcgtctggctgaagtgtaccgggtacgaggacgcgtggagcgctgttcgcaggggaaattgcaggtggtgctggacggcgtgatcgctgtttaagacatattgcctgatggcgctgcgcttatccggcctacccattgctcgtaggccggataaggcagttataccgccatccggcaaaggtgattacttcgctttaccctgattcgccacggcagccgctttcgcggcgatttcgtcagcgttgcccagatagtaatgtttgagcggcttgaagttttcgtcgaactcatacaccagcggcacgccggtcgggatgtttaactcaaggatctcatcttcactcatgttatccaggtatttcaccagcgcacgcaatgagttaccgtgagcggcgatgatcacgcgctcaccgctcttcatacgcggcaggatggtgtcgttccagtaaggaataacgcggtcgatggtcagcgccagactttcggtcaacggcagctctttctcgctcagtttggcataacgtggatcgtgacccggataacgctcatcatctttggtcagttccggcggcgtcacggcaaaaccgcggcgccactgtttaacctgctcgtcaccatatttttctgccgtttccgctttattcagcccctgcaacgcgccatagtgacgttcattgagtttccaggatttttccaccggcagccacgcctgatccagttcatccagtacgttccacagcgtatggatagcgcgtttcagtacggaagtgtaggcaaaatcaaagctgaaaccttcttcttttagcagtttacccgctgcttttgcttcgcttacgcctttttcagacaggtcaacatcataccagccggtgaaacggttctctttgttccattgactttcaccgtgacgtaccagaaccagcttagttacagccatactctcactcctataaatcatatgtaatgataataattctcattatattgccgcgaggtgttggcggcaatgcttacgcataaccatagcgaaaatagtggcgcagtgtaaggttcttgtgaattcagagttgcgattttgtctttaagtggtggaggtttgagcagggcaatggcgcgtaggcccgataagcttgcgtcatcgggcatgtagcggcatatcgttagaacggaataaactgatactcggtcaggctggcgtactcctcgccagggcgaaggatacagtcaggctgcggccattcaggatgattcggactgtccggcagcagttcgctttccagcgccagcccttgccagtcggcataaggttccggcccgcgggaaggtgtacccgccagataattgccggaataaaactgtagcgccggggcggtggtgtaaaccatcatttgtagctttccatcctgtgaccacagacgggccgccggctttttgccatcaccctgcgtctgtagcaggaaagcatgatcgtagcctttaaccttgcgctgatcgtcatcggcgagaaattcactggcaatgacttttggcatccggaagtcaaacgaggtattggctaccgattttagcccctggcgtggaataccggattcatctaccggcagatactcatccgccagaatttgcagcttatgctggcgcacgtcggtccgatcgccgtccagattaaaatagacgtggttggtcaaattcaccggacagggtttatcgaccgttgcccggtaggtgatggagattctattgtcatcggtcagacgatattgcgccgtggcgcaaagatggccgggaaaaccctggtcgccgtcatcagaggtgagcgcgaataatacctggcgatcgttctggttcacaatttgccagcggcgcttgtcaaagccttccggtccgccgtgtagctggttctcgccctgacttgggcttaactgtacggtttcgccggcaaacgtatagcggctattggcgatacggttcgcgtaacggccaatagaggcgccgaggaatgacgtctgttcagggtagtgttccgggctggcgcagcccagcaatgcttcccgaacgctgccgtcagacagcggaatacgggcggaaagaagagtggctccccagtccatcagcgttaccaccatccctgcgctgttgcgcagggttagcaggcggtacggttgaccatcgggggccagtgcgggcgtttcatttagcactgtcctgctccttgtgacggtttgcatacataaaaggtttctttgattccggttttcgcttcgtactgttgcgcaacggcctgccgaacagcgggaaccagatcttccgggatcagtgcgacaacacacccgccaaagccgccgccggtcatgcgcacgccgcctcgatcgccgatggtcgctttgacgatgtctaccagcgtgtctatctgcgggacggtaatttcgaaatcatcgcgcattgaggcatgggactccgccatcagttggcccatacgttgcaaatcacctttctccagcgcgcttgccgcttcaacggtgcgcgcattttcgctcaatacatggcgaacgcgttttgcgactaccgggtccagttcgctggcaacggcattgaacgcctcaaggctgacatcgcgcagggccggctgctggaagaaacgggcgccggtttcgcactgttcacggcgggtattatactcgctgcccaccagcgtgcgcttaaagttactgttgatgatcaccacggcgacacctttcggcatggaaaccgctttggcgccgagcgtacggcaatcaatcagcagcgcatgatcttttttgccgagcgcagagatgagctgatccataatgccgcagttacagccgacaaactggttctcggcctcttgtccgttgagcgcaatttgcgcgccgtccagcggcaggtgataaagctgctggaagacggtgcccaccgccacttccagcgaggcggaggagcttaacccggcgccctgcggcacattgccgctgatgaccatatccacgccgccaaacgcgttgttacgctgctgcaggtgtttcactacgccgcgcacatagttagaccactgctggctatcgtgggtcacgatcggcgcatccagtgaaaattcgtccacctgattgtcgtaatcggcggcaatcacccgtacggtacgatcgtcgcgcggcgcacagctaattacggtctggtaatcgatagcgcagggcagaacaaaaccatcattgtaatcagtgtgctcgccgatcagattgacgcggcctggcgcctgaatcgtgtgggtagcagggtagccgaaaatttcagcaaacagcgcgcgcgttttctctttcagattcatttttatactccggattcgcgaaaatggatgtcgctgaccgcgcgcaggcgttcagccgcttgttctgcggttaaatcacgctgggtttccgccagcatttcatagccgaccataaatttacggacggtcgcagagcgcagcagcggcgggtaaaagtgtgcgtgcaactgccagtgtgcgttttcttcaccgttaaacggcgcgccgtgccagcccattgagtaggggaaggaacactgaaacaggttgtcataacgactggtcagctttttcaacgccagcgccagagagtcgcgctgctcgtcgcttaaatcggtaatgcgcaggacatgcgttttgggtaacagtagcgtttcgaacggccacgccgcccagtaaggcaccaccgccagccagtgttcggtttcgaccacggtgcggctgccgtccgccagttctcgctggacataatccaccagcattggcgagcgctgctcggcgaagtaggctttttgtaaacgatcttcgcgttcggcctcattcggcaggaagctgttggcccagacctgtccatgcggatgcgggttcgaacagcccatcgccgcgcctttattttcaaagacctgcacccacggataggttttgcctaactcggcggtctgcgtctgccaggttctgacgatttccgtcagcgcgggcaggctcaactccggcagcgttttactgtgatcgggagaaaagcagatcacgcggctggtgccgcgcgcgctctgacagcgcatcagcggaagtggctgtccggcgcatccggcgtgtcggccatcagcgccgcgaaatcgttagtaaagacgtaagtccctttgtaatcgggatttttatcgccggtgacacgcgtattgcccgcacacaagaagcagtccggatcgtgggccggcagcatttgctgagacggcgtttcctgcgccccctgccaggggcgttttgcgcgatgcggcgaaaccagaacccactggccggtaagcgggttataacggcgatgcggatgatcgatgggattaaatggggtcataacaacgtccttaatctgggtatccctgcggatggcgtgactgccagtgccaggtgtcctgcgccatttcgtcaagcgtgcgggtgacgcgccagttcagctcgcgatcggctttgctggcatccgcccaatacgccgggagatcgccgtcgcggcgcggcgcgaagtggtaattaatgggtttaccgcaggctttactaaaggcgttgaccacatccaggacgctactgccgacacccgcgccgaggttataaatatgtacgccggatttgtccgccagtttttccattgccacgacgtgcccgtcggctaagtccataacgtgaatgtaatcgcgtacgccggtgccatcctcggtcgggtaatcattgccgaaaacggcgagcgattcgcgacgacccacggcgacctgggcgatatagggcatcaggttattcggaataccttgcggatcttctcccatgtcgcccgacgggtgcgcgccgaccgggttgaaataacgcagcagcgcaatactccactccggctgggctttttgcagatcggtgaggatctgttctaccatcaatttacttttgccgtaggggctttgcggcgtgccggtaggaaaactttcgacgtaagggatcttgggctgatcgccataaacggtggcagaggagctaaaaataaggtttttaacgttggccgcacgcatggcgctgaccaaccgtagcgtaccgttgacgttgttgtcatagtactccagcggcctggcgaccgattcgccgacggctttcaggccggcaaagtgaatcacggtatcaatcgcgtgatcgtgcagaatttcggttataagcgcttcgttgcgaatatcgccttcgacaaaggtcgggtgcttaccgcccagacgttcaatcacgggcagcacgctgcgcttgctgttgcagaggttatcgaggatgacgacgtcatgaccattttgcagcaactgtacgcaggtatgacttccaatgtaaccgctaccacctgtaaccaatactctcataattcgctccgttaagcctatggtatggaataaccatagcataacaaagatgcgaaaagtgtgacatgtaataaattagtggaatcgtttacacactggtgattttacgcatttgtatcgattaaatgattacaaatcatctggcttgagaatgcttctgctttttatccgaaaaaaaggcgcgttacgcgcctgggaatgaaacggacggggcaagagctgtcagtcttttttacgcgagagtagcttcctggcgagcgccccgacagcgacgacgccgatggcggtcactttccagaatttaagcaacgcgataccgagcatagcaagcagtcctactttcttggccgcgataccgccaatcagcgcggcgagcccatactccgctattttgtccgttgattcgttgaagtcagcgtagcgttgtccagcgttgaacttgacggaactgagaattcttttcgccagagggatttcgtggtcaacagaacctctgtcggtcaccagatttaaagaaaaatagccttcacgtcccagcagataggtgttgtagttcacgccttgttcattcagtggttcgttggtgccgatatcctggatggcggcggaccagatcagacgatgattggttgcatcgtaggtaggcttctcgatccagccaataatttctatcggctcaatgccttttgcaatacgatctttattcgcttcttttgtgcctttgcgcaggttatccattaattcatcggcatcccagttttttgcatcatcatcttttacataaccagaatcatcatattcgatagaaataaatccattcatttcctttttaaatacgaggccgtaaaaatattcatcgtcaacatagttaccaatttcacgcataaataccgccgcttcttttgcgggtatccaggtaaatccttccggcagattaagcgtggctttatcacctaaactaatctttgtcggacccgcaacggcggcgcgactcatgtcttcaacagcgacctcaacagcggttttacgcgcttcctgcgcagcggtcggcttttgctcagcataactgctggggcaaaataaaatagctgccagtaaaaatagtattatttgtggaaaacgaaaagccataatgaatcccttatattcacatacgacatcattgtcgaaaatttcaggattattatgacaatgaggcggtcagcgattcaagagatagtaagcttatcgaccgttattattattcttaataaaaggagagtggttccagaatggcgcgcggcgccattctgataatacatttaattattgcatcgtccggaaacgtacttataacgttcgccctctggtacaaattccagccggtgggtaatacaggcaggcgcatcctctgcatgatgggaaacgaacagcagttgggtctctccctggcgaattaatacatctacaaaacggcgtaccagttggcggttcagcgggtccaacccttgcagcggctcatccagaatcaacactgtcggatgcttaaccagcgcgcgcacgattagcgccagccgctgctgtccccaggagagactgtggaagggggcatccgccgtacgcttatcgattcccagaatatccagccactgttgcgccagttttcgttgcctgtctgaaacggcctggtaaatgccgatagaatcgaaatagccggagagaatgacattgcgtaccgtggtactgacgcggtaatccagatgtaaactgctgctgacgtagccgatatgttttttgatatcccagattgtttcgccgcttcctcgccgccgcccgaacagcgtaagatcgttgctgtagccttgcggatgatcgccagtaataaggctaagcaacgtagacttacccgctccgttaggaccgacgatctgccagtgttcgcccggattgactcgccagcttaagtggtggaggatagggcgatcgttatacgagactactccatcgttaagtacgatccgtggttcgccatcgggtaacgcatggcgggcggaaggttcgtccggttcgggtaattgtacgtcggtcagacgctcgctgtgcgcgagttgagcaaccaacgcccgttgcagcaactccgccgtcgttccggtctccgccagcgtacagtcggcaagcacgccggcaaactgcacgaagtccgggatctcatcaaaacggttgagtaccagcgccagggtcatacccgcctggttcaacgccgtcaggcgttgcgccagttgttgacgggcggtcacgtcaagcccgtcgaacggttcatcaaggatcaataactctggctcagacatcagcgcctgacacagcagcgcttttcgcgtctcgccggtagaaaggtatttaaaacgcctgtcgagtaaagcggaaatgccgaactgctgcgccagtatcgcacagcgggcaggatggtgaacatcatcctgaataatttccgcggtagtgcgcccggtatcgtcttcgccaggactgagcatatcggtgttattacgttgccactcatcgctgaccagcttttgcaattgttcaaaggacagacgagtaatgcgggtaaaccgacactggcgctcgcctgttaataacggcagttcgcccgccagcgcgcgggcgagcgccgacttcccgctcccgttagccccaacgaatgcccagctatcgcccgcattgagcgtcagcgaatccagatgaagtgtttttgtatcgctcagacgaaacgtgccttgcgaaatttgcaacgatgacattttgcatcccattttttgcagcgatgaatgacagggatacgtctttcggcaacggatgtcaatgtgcttagcacaacgttgcaataatcactctgtccgcattaaaccaggcaatcacgtcatcgccttcctttaacgtggcggcatctgaagtcggtatcgtggcgcacagcgtctggccgtccggcagcgccatcaacacttcacactgttccgcgccgcgctcgatatggctgatcgttcccgacaactgattgtcagcggcgcgcgcaacggctgcatcccgggtaatgccaacccacggcgcttttagcaggatcagcacttcttttccctcctccaggccgagacgctcgccgctttgcgccgtcagcgcgactttgagccgcgttttgccgtcggccagcagcacgtcgacatgctgttgcaccagatcgcgatcgcgggcggtaatggtgccgaaccactgatttcgggcgctggtttgcagtgaaaagcgggagatagcggccagcagactgtcaagcggcagggcgtcatcgtcgcttaacacatcgaacgctttttgctgaatttggcccagcaaatcgtaaagctggatcagacgctggccatagcgggttaataccgcgccgccgccgcctttgccgcccgttgcgcgttcaaccagcatatgttcgctaagctggttcatgtcgtttatcgcatcccaggcgctcttatagctgattcccgcgtctttcgcgccctgactaatcgagccggaaagcgcaatgtgtttcagcagagagatacgtcggggatcggcaaaaagcttttgctgaagtttcagggtaagaaggatttcggcctgcataaccagctcctggtaaaaagactattgtgactgaaaagcgcgtcagcgcaaagccgaccgcacaaaaggggagtgcttttctgtgtgatgcggttaaaatacaaaaaggactatatctggagttgcccatgttagagttattaaaaagtctggtattcgccgtcatcatggtaccggtagtgatggccatcatcctcggtctgatttacggtctgggtgaggtgttcaacattttttccggtatcggtcagaaagaccagtccagacagaaccgctgatttccccaaacgcccgctcagtcgggcgtttttgttactcaagatcctgcttttcctgccgatattttctgtgtttaatcgttaatgggtatgaataaccgctgggaaacccctgagattatcgttatattatcgtttacataacgaaacgcacaaggagttacagatggcgcattcctggttacgcctggtcgcaggggcaacattatctttcgtcatcgccggtcatgcgctggcggatgaaggcaagatcaccgtatttgccgccgcgtcgctaacgaacgcgatgcaagacattgcggcagaatataaaaaagagaaaaatgtggatgtggtctcctcattcgcctcctcttcaacgctggcgcgccagatagaagcgggcgcgccggcggatctcttcatctctgctgatcagaaatggatggattacgcagccgataaaaaagcggtggataccacgacgcgcgaaacattgcttggcaatagcctggtggtggtagcgccgaaagccagcgagcagaaaccgtttaccatcgacaacaaaacggactggattcgtctgctgaacggcggacgtctggcggtgggcgatccgcaacacgtaccggcgggaatttatgccaaagaagcgctgcaaaagttgggcgcatggcaaacgcttgaaccgaaactggcgccgggcgaggatgtgcgcggcgcgttggcgctggtcgaacgtaacgaagcgcctttgggcattgtatacggttctgatgcggtcgccagcaagggggtcaacgtggtggcgacgttcccggaagattcacataaaaaagtggaataccccatcgctatcgtggaggggcataaaaatgcgaccgtcagcgcgttctatgattacctgaaaggaccgcaggcctcggcaatctttaaacgttatggatttacgacgaagtaatgatactgaccgatccagaatggcaggctgtccttcttagcctgaaagtgtcttccctggccgtgctgtttagcctgccgtttgggatcttttttgcctggttactggtgcgatgccggtttccgggcaaagccttacttgatagcgtcctgcatctgccgctggtgctgccgccggtggtggtcggctatctgctgctggtgtcgatggggcgacgcggatttattggccagtggctgtatgactggttcggtctcacgtttgcctttagctggcgcggcgccgtgctggcggcggcggtgatgtccttcccgctgatggtgcgggccattcggctggcgctggagggggtggatatcaagctcgaacaggccgccagaacgctgggcgccgggcgctggcgcgtttttctgactatcaccttaccgcttaccctgccaggcattattgtcggtacggtgctggcgtttgcccgttcgcttggcgaatttggcgcgaccattacctttgtttccaatattccgggcgaaacccgcaccataccttccgccatgtataccttgatccagacgccgggcggggagagcgcggcggcgaggctgtgcgtgatttcgattgtattagcgctgatttcgctgttgatttctgaatggctggcgcggattagccgtgaacggacggggcgctaaccatgctggagcttaatttttcccagacgctgggaacgcactgtttaaccctcaacgaaacgctgccagccagtgggatcacggctatctttggcgtctccggcgcgggaaaaacctcgctgattaatgccatcagcggtttgactcgcccgcaaaaaggacgcatcgcgctgaatggccgggtgttgcatgacgcggaaaacggtatctgtttaacgccggaaaagcgccgcatcggttatgttttccaggatgcgcgcctgttcccccattacaaagtacgcggcaatttgcgctacggcatggcgaaaagcatgaccggtcagtttgataagctggtgtcgctgctgggaattgaagcgttgcttgatcgcctgccggggagcttgtccggcggagaaaaacagcgcgtagcgataggccgggcattgctcaccgccccggagttgctgctgttggacgaaccgttggcctcgctggatatcccgcgtaaacgcgaattactgccgtacctgcaacggctggcgcgggaaatcaatattcccatgctgtatgtcagccattctctcgatgaaattctccacctggcggataaagtcatggtgctggaggatggacaggttaaagcgtttggcccgctggaagaagtctggggaagcagcgttatgcacccgtggctgccgaaagagcaacagagcagtattctgaaagtcagcgtgctggagcatcacccgcattatgccatgaccgccctggcgcttggcgaccagcacctgtgggtaaataaactcaatcagccgctgcaatccacactgcgtattcgtatacaggcgtcggatgtctcgctggtactacagccgccgcagcagaccagtatccgcaacgtattgcgggcaaaagtggcgaattgttatgacgataacgggcaggtggaagtccagcttgagataggcggcagaacgctgtgggcgcgaataagcccgtgggccagggatgagctgaatatcaagcctggcctgtggctttacgcgcaggtgaaaagcgtttctatcaccgcctgactatagcaggtgggtgtaaataaatttggcgatgctatcggtagtgttatcgccgatcacaacgtcagcgcgcgctttcaccgcctcatcggcgttgcccatcgcaacgccggtgcctgccgcctccagcatactgatgtcgttgtagttatcgccgaaagcgatcacatttttcattgaccctccctgcgcttctatccactgggtaaggcgcttgcctttactgttgcctttgcgcgcgatatccacctgatcgtgccatgaccattcgcactccaggccaagcgcctgttcaacatgctgaccgaaccgctgtagtctgggaatatcttcatcggtaagcgcaaacttccacacggcattcacgtcgcgcgccgcctgcgctaacgaagagacctgtgtaaaggtcggacgttgttccggcggcaaggtctgcgcccaccgggaggtacgcacgacgtggccggttgggtgttcgtaaagcatagcgtcatcaacatacatcaggccgtgaatctgatgctcatccagtaaatcaatcaactgcaacgccttatccacgggcataggatcggcatccaggacagttttagcttgataatcatacaaataggtgccgttgcagcaaatagcaggtgtttccagcgccagcgcctgataaaaaggatgaatagcaacgtgatggcgaccagtgacaatgataagttgaaagcccgcctctttggcgcgtgatagcgcttcaagcgaggaggggagtaaggttttatgcggggttaataatgttccgtctaaatcgagggcaatcacgcgtgcagtcataattttttccagattaagagtaataactccgtctgtcggcatggtacaccgggacggtaagcagacaaaattctgcgtctgaattcagcattcgccgtcaaaagcgactacgttaagctgtgtcctgttattgcagctacatgccatatgcaaaggagtattcatgaaacaaacagtctataccgccagccctgagagtcagcaaattcacgtctggagcctgaaccacgaagggacgctgacgctggtgcaggtcgtggatgtgcccggtcaggttcagccgatggtggtcagtccggataaacgctacctctatgtcggcgtgcgcccggagtttcgtgtcctggcgtatcgtattgcgccggatgatggcgcgctgacgtttgccgccgaatccgccctgccgggtagcccgacccatatttctaccgatcatcatggtcgttttgtctttgtcggatcgtataacgccggtaatgtcagcgtgacgcgcttacaggatggcctgccggttgagctggtggatgtggtggaggggctggacggctgccactcggcaaatattacgccggataaccgtaccctgtgggtgcctgcgctaaaacaggatcgcatttgtctgtttacgctaagcgatgacggccatctggtggcccaggagccggcggaagtaaatacagttgaaggggcaggcccgcgtcatatggtcttccacccgaatcgacaatatgcgtattgcgtcaatgaactgaacagttcggtggatgtctggcagcttaaaaatccgcatggcgagatagagtgcgtgcaaacgctggatatgatgcccgccgatttttccgatacccgctgggcggcggatattcatattacgccggatggacggcatctgtatgcctgtgaccgcaccgccagtctgattaccgtctttagtgtctccgaagatggcagcgtactgagcgttgaaggcttccagccgacggaagcccaaccgcgcggctttaatatcgacaatagcggaaaatacctgattgctgcgggtcaaaaatcacatcatatcgcggtctatgaaattacgggcactcaggggttgctgacggaaaaaggccgttatgccgtcggccaggggccaatgtgggttgtggtgaacgcgtactaaagcgctgtgtgccggatggaggcgggctggagctcatcaaggcgggatgcctgattaatttcaataaacattgcttgcagtaaaaccacgggccgccacatctgctgcggcggcccgtttataagcctgaaccggaacggtgattactgcttaggttccgccactactttactgcctataccgcggttgttgtattcccacatgcggttgtagttagtgtcgttcagattacgctgcacctcgtctttgtcatccacggttcccgtatttccagcaaacggacgtttcgagatgaccgcgtcggcccacggtttggcaacgttgaagccctcgttaatcacgctgtcgcggatcacgacctgaccgttggtgttggcgtcgacatccagcgagcggccaagctgcgcaacgccatcgccggaggcgttaaagcggctgttgatcgccaaaaagccatagtaaatattggacagcgtcgccggggcgaagacgtaggcttcctgctgtgtgcgggagttgacgacctggaagttggtgttatcgaacaccacggcgccgcgtccggaaaccatatccacatcgccttcaatatagctgttcgtcaccagcgtacgtggctggcgatcggtttgcagacggttctgcacgccgctgttggtcacaaagaaggtgttctggcggccaaggatattgaccttgttaatctggactttgtcgccatcggtacgcagcgccaccgccggatggtttccggcatcgacgctgtcgcccagcgtgttctcgatggtcagattttgtagctgcagaccgttattctgcgaccagaacgcggcagaacacattacaccgatcgtcgcggcgtgtttgctttggcagttatcgaacatataccaggcgggtttaccaggcatatatttcccgccgggattcaccgcgcggcgccagtcagcgacactcatttcaccatcaatcgccatcccaattttcacatcgatcggtttttcaccggtcccgtacagggtcagacttcccggcgcggcgggaacatacacggtcccctgatagtcgcccggcataatagcaatgtactggcgtttgttcgtgcgtttaaccattgccgcatcgaccgcggcctgaatcgaggtgtgcgtaacgcctggcgtacctgccggccccaccacaaagtcaggctgtgcgggcagggtaatcggcgacggcgaccacggggcggtattcggcgtcagggaggcaaaatagcgcgccgcaacgaagtttttcgcttcatttgccgacagaattgggcgcgaggcggtgccaggcgcggtttgatcggaagggatctgatcgggtggcgtagagctacaggcgctcagcgtcacgccaaaagccagtgccagcgccagacgggaaaccgataatgtattcacaggttgctccgggcttgaaaaagttaaatgacatccattgaagcctgcttttttatactaagttgaacgaaacgggaaggcgaaaaggtaaaaagttccttttcaggccggaaacacctgtagcatcagatagttttatcacaattaagcaacaactttcgcgctttgagttgacaatccggagcagaaagaaaataaatgtctatacaacccatgacaggcaagagagcgacaggaatgcggcaacttttaccgggcgatactgtctggcgaaacatcaggctggcgacaatggacccgcagcagcaagccctgtacgggctggtggataatcaggcgctgattgtgcgcgaagggcatatttgcgatatcgtgccagagacgcagcttcctgtcagcggggacaatatccatgatatgcagggacgactggtaaccccgggacttatcgattgccacacgcatctggtgtttgccggtaaccgcgccgcagagtgggaacagcggcttaacggcgcgtcataccagcatattagcgctcagggcggcggcattaacgcgacggtatcagcaacccgcgcctgtgcggaggagacgctctacctgctggcgcgcgaacgcatgatgcgccttgccagcgaaggcgttacgctgctggagattaaatccggctatggtctggagctggcgacagaagaaaagctgttgcgcgtcgctgcaaaacttgccgccgaaaacgctatcgacattagccccacgctattggccgctcatgctacgccagcggagtatcgtgacgacccggacggctacatcactctggtctgcgagacgatgattccgcagctctggcaaaaagggttatttgatgcggtagacctcttttgcgagagcgtcggctttaatgtggcgcagagtgagcgcgtattgcagacggcgaaggcgttaggtattcccgttaaaggccatgttgagcagctttcgctgttgggcggcgcgcagttggtgagccgttatcagggcttatcggcggatcatatcgaatatcttgatgaagtgggcgtcgcggcgatgcgtgacggcggtactgtcggcgtattattgcccggcgcgttttattttctgcgcgagacgcagcgcccgccggtagaactgctgcgccgctatcaggtgcctgtcgccgtcgccagcgatttcaatcccggcaccagcccgttttgcagtttgcatctggcgatgaatatggcctgcgtacagtttggtctgacgccggaagaggcatgggcgggcgttacgcgccatgccgctcgcgcgctgggaagacaggcgacgcatgggcagatcagggccggctaccgggcggattttgtggtgtgggatgctgaacagccggtagagatagtgtatgagccggggcgtaaccctttatatcagcgggtatacagaggaaaaatctcatgacgcaatggtatccggcttctccggcgctctggcaggggcgcgatgacagtatagaagcgccggatgcgcggcgtctgtttcagaccgtcacgcgcagcgagaccttttcccccgaaaactggcagcaaaagatcgcgttaatgggatttgcctgcgacgagggggtaaaacgcaatgcagggcgtcccggcgcggcaggcgccccggacgcgttgcgtaaagcgctggcgaatatggccagccaccagggacatgaacggctggtggatttaggcaattgggttgcgccgacgcccgatctggaaggcgcgcagcaggccttgcgcgatgcggtaagccgctgtctgcgggccgggatgcgcacgctggtactgggcggcgggcatgaaaccgcgtttggacacggcgcgggggtgctggacgcgtttgcgcaggaaagcgtagggatcattaatcttgatgcgcatctggatctccgtcagaccgaccgggcaacatccgggacgccgtttcgtcaactggcgcagctatgcgacgcgcagagccgcgcgtttcattatgcctgtttcggcgtgagccgtgcggcgaatacgcaggcgttgtggcgggaagcgcagtggcggaatgttaccgtggtggaggatctggactgccatgacgcgctggcgcagatggcgcagtttatcgacaaggtggataaaatttatctgactatcgatctcgacgtattgcctgtctgggaaatgccggccgtctccgctcccgcagcgctgggcgtgccgctgatacaggttctgcgtttaattgagccggtttgccgcagcggaaaattacaggcggcggatctggttgagtttaatccacgctttgatgaagatggcgcagcggcgcgcgtggcggcgcggcttggctggcaaatcgcgcactggtggcgttaatctgtcatccggaaaacattatccgcataaggaaggcttcacgcatgtattcatcccgctcccgttctgcacctgcgcctttttacgaaacggtgaaacaggacatctgtaaaaaaatagccggcggcgtctggcagccgcacgatcgcattccgtcggaagcagaactggtcgcccagtatggctttagccgaatgaccatcaatcgggcgctgcgtgagctgacggatgaagggtggctggtgcgtttacagggcgtggggacgtttgtcgccgaaccgaaaggccagtccgcgctgtttgaagtccgcagtatcgccgaggagattgccgcccgccgtcatcagcatcgttgtgaggtgctcacgctggagcgcgtgcgggcaaacgccatccaggccagcgctctcaacgtcaatgagagcgatgtcattttccattccatcatggtgcattatgaaaacgatctgccggtacaaattgaagatcgctgcgtgaatgcggatattgccgtggattacctgacgcaggattacagtcagaccacgccgcacgcttatttgtcgcggatcgcgccgctaacggaaggggaacatattgtggaggcggtgcgcgccacggcgcaagagtgcgcgtggttaactatcaaagagcatgagccttgtctgctcattcgtcgtacaacctggtccgcgtcgcggattgtttctcacgcccgcttacttttccccgggtcgcgctaccggctacagggacgatttatctcctgagcggactgctgccggaaaacgtgattgctgacacaatataacaaaattgtatcatttttgttaattctattcttgtgcttacttgtatagacaagtatatgtctgattcttatctgtgggtctgcggcggtgcctgatagtggcgttttagcgttatttggcgatggcagaccgataataatgaggagtcattgctatgcctgaaagcaagtatcgtcagcagactatccgcgcgcccagaggcacggtattaacggcgaaaagctggctgacagaagccccgctgcggatgttaatgaataatctcgatcctgacgtggcggaaaatccgcatgagctggtggtctacggcgggattggtcgcgccgcgcgcaactgggaatgctatgacgctattgttgatgcgctcacccggctggaggcggacgaaacgttgcttattcagtctggcaaaccggtcggcgtatttaaaacgcacgacaacgcgccgcgggtattaatcgccaactccaacctggttccccactgggcgacatgggaacattttaacgaactggatgcgaaagggctggcgatgtacggtcagatgacggccggaagctggatctatatcggcagtcagggaatcgtgcagggaacatacgaaacctttgtcgaggcggggcgtcagcactataacggcacgctggcgggacgctgggtgctgactgctgggctgggcggcatgggcggcgcgcaaccgctagccgcgacgctggccggagcgtgttcgctgacgattgaatgccagcaaagccgtatcgattttcgtctgcgtactcgttacgtggatgagcaggccgccacgctggatgacgcgctggcccgcattacgcgctacacccgcgaggggaaagccgtgtccgtcgccctgtgcgcgaacgcggcggatatcctgccggaactggttaatcgcggcgtgcgcccggacctggtgaccgatcagaccaggcccacgatccgctacatggctatttaccctccggctggcgctgggaggagtatcagaaaaacgcgcaatccgatccccacgggacgatgcaggcagcgaaacgttccatggcggcgcatgttcgggcgatgctggcgttcagtaaaatgggcgtgccgacctttgactatggcaacaatattcgtcagatggcgaaagagatgggggtggaaaacgcctttgattttccgggatttgtgccagcctatattcgtccgctgttctgccgtggcatcgggccgtttcgctgggtggcgctgtccggcgatccgcaggatatctataaaaccgatgccaaagtcaaagagatagtggctgaggataaacatctgcatcactggctggatatggcgcgcgagcgcattcattttcaggggttaccggcgcgtatctgctgggtaggcctggagtggcggcaaaaactggggctggcgttcaacgaaatggtgcgttgcggcgaggtatccgcgcccattgtgattggccgcgatcacctggattccggctctgtcgccagccctaaccgtgaaaccgaagcgatgcgcgacggttccgacgcggtttccgactggccgctgttaaatgcgttgctgaataccgccagcggggcgacatgggtatcgctccatcatggcggcggggtgggaatggggttttcgcaacacgccggtatggtgattgtctgtgatggcactgacgaggccgccgcgcgtattcgccgcgtgttacacaacgatccggcgacgggcgtcatgcgccatgccgatgccggatatgatctcgcggtggaatgcgctgttgagcaaggtctgaatttaccgatggttgcggcgacgcaggggaaaggctgatatgaacaccatgacactcactccggggcagttaagtctctctcaactgtacgatatctggcgtcatccggtacagcttcggctggacgccagcgccattgacggcattaacgccagcgtcgcgtgcgtcaatgatatcgttgccgaagggcgtaccgcctacggcatcaacaccggtttcggcctgctggcgcagacgcgcatcgctgatgaagacttgcaaaatctacagcgatcgttggtgctgtctcacgccgcgggcgtaggcgacccactggatgacgcgatggtgcgtctgatcatggtattgaaaatcaatagcctggcgcgcgggttttccgggattcggttgagcgtgatagaggcgctcatcgctctggtgaatgccggcgtgtatccgctgattccggcaaaaggctcggttggcgcgtcgggcgacttagcgccgctggcgcatctgtcgctgacgctgcttggcgaaggaaaagcgcgctggcagggcgaatggcttccggcgcagacggcgctaaaaaaggccggactggagcctgtcgcgctggcggccaaagaggggctggcgctgcttaatggcacccaggcatcaacggccttcgcgctgcgcggtttgtttgaggcacaggagttatttgcctccgccgttgtctgcggcgcgctgactaccgaagccgtactgggatcgcgccgtccttttgatgcgcgcattcatgccgcgcgcggacaacaggggcaaattgacgtcgcgcggttgttccggcacctgctgaccgataccagcgccattgctgaatcacatcaccactgtcataaagttcaggacccgtattcccttcgctgccagccgcaggtaatgggcgcttgtctgacccagttacgtcagacgaaagaggtactgctggctgaggccaacgcggtatccgataatccgctggtctttgccgatgcgggggaggtgatctccggcggtaacttccatgctgaaccggttgccatggcggcggataatctggcgctggcgatagcggaaatcggcgcgctatcggagcggcgcatcgcgctgatgatggataaacatatgtcgcagttaccgccgttcttggtgaaaaatggcggcgttaattccggttttatgattgcccaggtcaccgccgcggcgctcgccagcgagaataaagcgctggcgcacccgcacagcgtggatagcctgccgacctcggcgaatcaggaagatcatgtctcaatggccccggcggcagggcggcgactctgggaaatggcggcgaatacccgcggcatcattgccgtggagtggctggctgcctgtcaggggatagatttacgggaagggttaacctccagcccgttactggaacaggcgcggcagacactgcgcgagcaggtggcgcactatacgcaggatcgttttttcgcgcccgatattgagtgtgcgacggcgctgctggcgcaaggcgcgttacagcgtctggtgccggactttatgtgaatgctgccggatggagcggcgcttattcggcttacccaacccgttggcagggtaagacgtttacgccgccatccggcacagcgtttaactgaacatcgccgtgatcgaggcgctggcgagcgaatggaaatgcacgttaaagccgaccatcgcgccgctggcgtcttcatcaacgtcaagacgctcgacgtccagcgcgtgaaccgtaaagatatagcggtgcgtttcccctttaggcggcgccgcgccgccgtagcccgctttaccgaaatcggtacgcgtctgaatgacgccgtctggtacggccaccaggcctgagccgaacccctgggtcagtacgcgcgtatccgccgggaggttcaccaccacccagtgccaccagccggagccggtcggcgcgtcgggatcgtaacaggtcacgacaaaacttttggtgcccatcggcacgttgtcccaggccagatgcggcgaaatattatcgccatcatagcccataccgttaaaaacgtggcgatgaggaagtttatctccatcgcgcaaatcgttgctgataagtttcatgcgctctccttttgactcaccagaagtgtagccagaagcagcatcgcttaccgctgattaatggctaaaaaatgtttcattgtgtaccgcgtcattgaccgcctgggtcaaacggcgcagttgatccggacgaataatgtagggcggcatcaggtagattagcttgccgaacggcctgatccagacgccttgcccgacgaagaagcgttgaagcgccgccatattgaccggatgcgtggtttcaaccaccccaatcgcgcccaatacccgcacatccgccacccagggcgaactttgcgcgggggctaactcagcgcgtaactgagactcgatagacgccacctgctgacgccattcgccgctttccagcagcgtcaggttggcgcaggcgacggcgcaggccagcggattccccataaacgtcgggccatgcataaaacaccccgcctcgccgttgctaatagtctctgcaacctggcgtgtcgtgagcgttgccgagagggtcatggtgccgccggttaaggctttgccgagacacagaatatccggcgcgatcccggcgtgctcgcaggcgaacagtttgccggtacggccaaacccggtggctatttcatcggcaatcagcagaatgccttcgcgatcgcacatgttacgaatacgcctgagccattgtggatgatatatgcgcatcccgcccgcgccctgaacgataggttccagaatcacggcggctatttcatggcgatgcgcggccatcaggcgggcaaatggcgcgatgtcgctttcatcccattcgccatccatccggctttgcggcgccggcgcgaacagattttccggcagatagcctttccacaagctgtgcatggagttatccggatcgcacaccgacatcgcgccgaacgtgtcgccatgataaccgtggcgaaacgtcagaaaacgctgacgcgattcgccgcgcgcctgccagtattgcagcgccatcttcatggccacttccaccgacaccgacccggagtcggccagaaagacacactccagcggctcaggcgttatcgcgaccagcttacggcacagattcaccgcaggttgatgggttatgccgccgaacatgacatgcgacatggcgtcaatttgcgctttcatcgccgcgttcaattgcgggtggttataaccatgaatggccgcccaccaggaggacatcccctcaatcaggcgtttgcccgaggcgagaaccagctcgcagccttcggcccgctcaacgggatataccggcagcggcgaggtcatggaagtgtaaggatgccaaatatggcgtttatcgaaggccagatcgtccgttgtcataatcgacttgtaaaccaaattaaaaagatttaggtttacgagtctacaccatatcaaaaacaaacaacatattttggagaagcccgatggctcgccacccacgctggacactgtcgcaagtaaccgaattatttgaaaaaccactgctggaattgctgtttgaagcgcagcaaattcatcgccagcatttcgatccgcagcaggtacaggttagtacgctgttgtcgatcaaaaccggcgcctgcccggaggattgtaaatactgcccgcagagctcgcgctataaaaccgggctggaagccgagcgtttaatggaagtagagcaggtactggactccgcccgtaaagcgaaaaacgctggttcgacccgcttctgtatgggggcggcctggaggaatccgcatgaacgcgatatgccttatctggagaagattgtacagggcgtcaaagcgatggggctggaaacctgtatgacgctcggcatgttgaacgagagccaggcgcagcgtctggctaacgccgggctggattactacaaccacaacctcgatacctcgccggagttttacggcaatatcatcactacccgtacctatcaggagcgcctcgacacgctggaaaaagtccgtgaagcagggattaaagtgtgctccggcggcattgtgggtctgggcgaaacggttaccgatcgcgccggactgttgttgcagttggcgaacctgccgacaccgccggaaagcgtgccaatcaacatgctggtgaaggtaaaaggcacgccgcttgcggataacgatgacgtggatgcgtttgattttattcgtactatcgccgtggcgcgcatcatgatgccgacctcatacgtgcgtctttccgcagggcgtgaacagatgaacgagcagacccaggcgatgtgctttatggccggggcgaactcgattttctatggctgcaaattgttaactacgccaaatccggcagaggacaaggatctgcagttattccgtaagctggggctgaatccgcagcagaccagggtgctggcgggcgataacgagcagcagcaacgtctggagcagacgctgatgacgcctgacaccgatgattattacaacgcggcagccttatgagttggcaacaacgcgtcgacgatgcgctgacggcgcgtcgggtgacggatacgttgcgccgccgctatgtggtatcgcagggtgccggacgctggctggtagcgaacgggcgacagtatcttaacttttccagcaatgattacctcggcttaagtcaacatccgcagattattcgcgcctggcaacaggcagcgacgcgttttggcgtcggcagcggcgggtcgggtcatatcagcggttattccgtggcgcaccaggcgttagaggaggaactggcgcaatggttaggatatccacgcgcgctgctgtttatctctggctttgcggcgaatcaggcggtcattaccgccttaatgaaaaaaaatgaccggattgtggccgacaggttgagtcatgcttccctgctggaggccgctaatctgagtccggcgcagcttcgccgctttatccataacgatacgcagcatctgtcgcgtttactgcaatcgccctgcgtgggtcagcaactggtggtgacagaaggtgtatacagcatggacggcgacagcgcgccgctggcggaaatccagcacattgcccgcaggcatcatgcctggctgttggttgatgatgcgcacggcatcggcgtgactggcgatgaggggcggggcacctgctggctgcggggggtgaagcctgagttgctggtggtgactttcggtaaggggtttggcgtcagcggcgcagcggtgctctgctcggaaagcgtcgcggattatctgctgcaatttgcccgtcatctggtttacagcaccagtatgccgcccgcccaggcgcaggcgttaagcgcctcgctggcggtgatccgtagcgatgaaggtggtgaacggcgcgaaaaactcgccgctctggttcagcgctttcgggccggcgttaacgcgtcccgatttacgctactgaatgcccatagcgccatccagccgttaatcgtgggcgataacagccgtgcattgcgcctggcggaggcgctgcgtcaacaaggatgctgggcgacggcgattcgcccgccgacggtgcctgtcggcacggcgcgcctgcgcttaacgttaacgcaggcgcatgaagcgtgtgatatcgaccgtctgctggaggtgctgcatggcgcaggtgaataagcaggctattgcggcggcgtttggccgggccgcatcgcaatatgaacagcacgcctctttgcagcaacacagcgcggatgcgctgctgacgctgttgacaggccgccagtttgccagtgtgttggacgcaggctgcggccccggacgtatgagtcgttactggcgagagcgggggagcgaagtgaccgccctggatctttctctgccgatgctgcaacaggctcgcgatcgtcaggcggcgcatcactatttgctggcggatatcgaagcgattccccatgacgccgaagtttttgacctggcctggagcaacctggcggtccagtggtgtggcgatttacgcgatgcgttgagcgagttgtatcgggttgtacggcccggcggcgtggtggcgtttaccaccttgtgccaggggtcgttgccggagctgcgtcaggcatggcaggccgtcgataatcgcgctcacgcgaatagctttttgccggaagaggccattgaccacgcgctgcgcggctggcgggcgtttcgtcatactcaggcgatgacattgtggtttgaggatgccctgagcgcaatgcgctcgcttaaaggcattggcgccacccatcttcatgaagggcgggagtcggatgtattaacccgcgcccggcttagacagattcaactggcatggccgcagcggcaggggaaatatccgctgacgtaccatctttttatgggagtgattgaacgtgactaaacgctattttgtgaccggtactgatactgaagtcggtaaaacggtcgccagttgcgccttattgcaggccgcaacgcagttaggttatcaaaccgtaggctataagcccgtcgcttccggcagcgaaatgacaaccgacgggctacgcaatagcgatgccctggccttgcagcgtaacagcagcctgccgcaaccttattccgctatcaatccttatacttttgccgagcctacctctccccacatcgttagcgccgacgaaggccgggcgatagacgcggcggtgttatcacgcggattgcgaacgctggaggcgcaggcagactgggtgttgacagaaggggcgggcggctggtttacaccgctctctgccacgctgacgtttgccgactgggtacagacggagcagctgccggtgattctggttgttggcgtcaagctgggctgtattaatcacgccatgctgacggcgctggcggtagaacaggccggattaccgcttgtcggatggatagccaacgacatacagccgccaggcgcgcgtcatggtgaatatctcgcgacgcttcgccgcgtcataccggccccgctattaggggaaatcccgtggctgggcgtttctccatcgcaggcggcgacaggacagtatctggaccttagccccctggaacgcgcctgactgcgcttaaaaactgccttcttgcaggatcagacgatcctgctgttttttcgccagaccttcctgacgtcgccatgctaaaaatgtgcaaaatgtgagcgtctacgcctcaatttttcccttctcgttagccaataatctgccaaaaatagcgataatttttttttatcgcccggcgaaaacgtcaggagctgattttgccaggcggcaggggatacgggctggaagcagttatccactattcctgtggataaccttgtgtattagagttagaaaacacaacgtaagcgagaggcgacgcggcctgcgactaaattggcgcgaaagacggcttgagaaaatatcccttttcagacagcaagttatataaaatcaatggttgtaaaggaagggggatacgttgacataaaactttcatcatccgacttgacaaatgttaaaaaagactctggtctggggataaccagcacactgctggaattttaccccgcgactgtctatgttttacctctaaatagcgtggggtatctgccgatagccattatacactggagtgttactgttttttcatccagtattttttattggcaatattcaccgtcgagagtaaaattacacccctgcccgctcactccttcaggtagccgctcatgagtaaaccgttcaaactgaattccgcttttaaaccttctggcgatcagccggacgctatacgtcgtctggaagaggggctggaggacgggctggcgcatcagacgttattgggcgtgaccggctccgggaagacattcaccattgccaacgtcattgcggacttgcagcggccaacgatggtgcttgcgcccaataaaaccctggcggcgcagctctacggcgaaatgaaagagtttttcccggaaaacgcggtcgagtatttcgtctcctactatgactactatcagccggaagcgtatgtgccaagctcggatacgtttatcgaaaaagacgcttcggtaaacgaacatattgagcaaatgcggttgtcggcaacgaaagcgttgcttgagcgacgcgatgtcgtggtggtggcttccgtgtccgcgatttacggtctgggcgatccggatctctacctgaaaatgatgctgcatctgacggtgggaatgctgattgaccagcgcgcgattttgcgtcggctggcggaattgcaatacacccgtaacgatcaagcttttcagcgtggtacctttcgcgtgcgcggcgaagtgatcgacatcttcccggctgaatctgacgacatcgcgctacgcgttgagctgtttgatgaagaagtggaacgcctgtcgctgttcgacccgttaaccgggcaggtagagtcaacggtgccacgttatactatctatcccaaaacgcactacgtaacgccgcgcgagcgtattctgcaggcgatggaagagataaaagatgagctggcggacaggcgtaaggtcttgctggcgaataataagctgctcgaagagcagcgattaagccagcgcacgcagttcgatttagagatgatgaacgagctgggctactgctcaggcattgaaaactattcccgctttctgtcgggccgcgggccgggcgaaccgccgccaaccttgttcgattatctgcccgccgacggactgctggtggttgatgagtctcatgtcaccatcccgcagataggtggcatgtaccgcggcgaccgggcgcgcaaagagacgctggtcgagtatggcttccgtctgccttcggcgctggataaccgtccgctgaagtttgaggagtttgaagccttagcgccgcaaactatctatgtttccgccacgcccggcaactatgagctggaaaaatctggtgatgaggtggtggatcaggtcgtgcgaccgaccgggctgctggacccgattattgaagtgcgtccggtggcgacccaggtggacgatctgctgtccgaaattcgtcagcgtgcggccattaatgagcgtgtccttgtcactacgcttaccaaacggatggcggaagatttgaccgaatatctggaagagcacggcgagcgcgtgcgttacctgcactcagatattgataccgtggagcgcatggaaatcatccgcgatttgcgtctgggcgagtttgacgttctggtggggattaacctgctgcgcgaagggctggatatgccggaagtctcgctggtggcgattctggacgccgataaagagggcttcctgcgctccgagcgctccctgattcagaccatagggcgcgcggcgcgtaacgttaacggtaaagcgattctgtatggcgataaaatcacgccgtcgatggcgaaggcgattggcgaaaccgagcgacgtcgcgagaagcagcagaagtacaacgaagagcacggtatcactccgcaggggctgaacaaaaaagtggtcgacatcctggcgctggggcagaacattgcgaaaaccaaagcgaaggggaaaggcaagggccgttctacggcaaaagccggaattgtcgaactggatatgacgccgaaagcgttgcagcagaaaattcatgaactggaagggcaaatgatgcagcacgcgcaaaatctggagtttgaagaagccgcgcaaattcgcgaccagttgcaccagttacgcgagttgtttatcgcggcgtcctgacaatgtgtcgatcgccagcgagtcatcgttaccatggctcgcttttgagaatttcagtgcaatagtaagggctaagtcagtcaggaatgaaaaacagtgacaggctttgactaacgggattgtcgaaaaactcaaaacatcaatggggtagctagtttaatcacaactgaagaaaattagcgttgaggctgaacccaacgctaattttccctctctcctcggctatgaaaaaaaacgccccgtattatcggtatagctatccttatgatcgtcattttaatcttatatgagttcgttgaaagcgtgtcatggcaacagattacatcattctacttaaaaaagaggtgatggaagcgcgagcatctataagtcaagcgctgcaaatactgaatgatttgtccgaaataatgacgactgtgacctcttatttaaagttgagaatatccttatctgttactttaggttacgttcagatcaggtagggaaaatatgtttaatattactaatatacaatctacggcaaggcatcaaagtattagcaatgaggcctcaacagaggtgcctttaaaagaagagatatggaataaaataagtgcctttttctcttcagaacatcaggttgaagcacaaaactgcatcgcttatctttgtcatccacctgaaaccgcctcgccagaagagatcaaaagcaagtttgaatgtttaaggatgttagctttcccggcgtatgcggataatattcagtatagtagaggaggggcagaccaatactgtattttgagtgaaaatagtcaggaaattctgtctatagtttttaatacagagggctataccgttgagggagggggaaagtcagtcacctatacccgtgtgacagaaagcgagcaggcgagtagcgcttccggctccaaagatgctgtgaattatgagttaatctggtctgagtgggtaaaagaggcgccagcgaaagaggcagcaaatcgtgaagaagccgtacaacggatgcgtgactgcctgaaaaataataagacggaacttcgtctgaaaatattaggacttaccactatacctgcctatattcctgagcagataactactctgatactcgataacaatgaactgaaaagtttgccggaaaatttacagggaaatataaagaccctgtatgccaacagtaatcagctaaccagtatccctgccacgttaccggataccatacaggaaatggagctgagcattaaccgtattactgaattgccggaacgtttgccttcagcgcttcaatcgctggatcttttccataataaaattagttgcttacctgaaaatctacctgaggaacttcggtacctgagcgtttatgataacagcataaggacactgccagcacatcttccgtcagggattacccatttgaatgtgcagagtaattcgttaaccgctttgcctgaaacattgccgccgggcctgaagactctggaggccggcgaaaatgccttaaccagtctgcccgcatcgttaccaccagaattacaggtcctggatgtaagtaaaaatcagattacggttctgcctgaaacacttcctcccacgataacaacgctggatgtttcccgtaacgcattgactaatctaccggaaaacctcccggcggcattacaaataatgcaggcctctcgcaataacctggtccgtctcccggagtcgttaccccattttcgtggtgaaggacctcaacctacaagaataatcgtagaatataatcctttttcagaacgaacaatacagaatatgcagcggctaatgtcctctgtagattatcagggaccccgggtattgtttgccatgggcgacttttcaattgttcgggtaactcgaccactgcatcaagctgtccaggggtggctaaccagtctcgaggaggaagacgtcaaccaatggcgggcgtttgaggcagaggcaaacgcggcggctttcagcggattcctggactatcttggtgatacgcagaatacccgacacccggattttaaggaacaagtctccgcctggctaatgcgcctggctgaagatagcgcactaagagaaaccgtatttattatagcgatgaatgcaacgataagctgtgaagatcgggtcacactggcataccaccaaatgcaggaagcgacgttggttcatgatgctgaaagaggcgcctttgatagccacttagcggaactgattatggcggggcgtgaaatctttcggctggagcaaatagaatcgctcgccagagaaaaggtaaaacggctgttttttattgacgaagtcgaagtatttctggggtttcagaatcagttacgagagtcgctgtcgctgacaacaatgacccgggatatgcgattttataacgtttcgggtatcactgagtctgacctggacgaggcggaaataaggataaaaatggctgaaaatagggattttcacaaatggtttgcgctgtgggggccgtggcataaagtgctggagcgcatagcgccagaagagtggcgtgaaatgatggctaaaagggatgagtgtattgaaacggatgagtatcagagccgggtcaatgctgaactggaagatttaagaatagcagacgactctgacgcagagcgtactactgaggtacagatggatgcagagcgtgctattgggataaaaataatggaagagatcaatcagaccctctttactgagatcatggagaatatattgctgaaaaaagaggtgagctcgctcatgagcgcctactggcgatagctgaacgcagtttatcagaagagggagagagcctgtttacccttcggtgtaaacaggcttctgataagcgcagcgtcgtcggtaaacgggcttaacccaacgcctgtagcgctttttccagcgcattatgtaataactgacgatcgtggcgataggggatatcgctggcctccagcacttcctgaatcaccagccgatcgttcaccgcactgacgtcaactcgcggcccaaccactactgcgtcaatgacttttttgccaatatattgctccatcatcgccagcttatcgaccagcgttaaactggcggcgggcagactcagttcgcgacccagattgccgatatacaccattggcgctggggtgcgccgcagcgcctgcgccagttcatccagcagcaggcaaggcatcaggctggtataaaaactgccagggccaatcagaatcagatccgcgtcattaatggcctgtaccgcttcccgcgtcgccggaacgtttggcgttaacatgatctcctgcggcggcgtcgctaactgatcgatattcacctcgccataaatctcatgcccctgatcgtcaatcgccatcagatctaccggtagctccgacatcgggatcagctgcgcgtccactttaagcagattacgaattaaattaatcgcttccagaggccgcacgctcaggtgatctaacgcctttaacatcaaatttccgaggttatgaccagaaagttcgccattaccgccaaaacgatactcaaacatagcggacgcgacgctaggttcggtaattaactgattcagacagttgcgcatatcgccccaggcgatcccgccttccgagcggcgaatacggccagttgaccccccgttatctgtggtagtcacaatgccggtcaggcgcgaacctaatgaagaaagcgaggagaggacgcgtcctaatccatgccctccgccgagggcaacgacacgatcaaggtcagccagcgtacgattgcgcataaaaattcctgaagtcaaataagcagcgctacagtagcgcaagtcgcgggttttcagcaattagccgaccggctaaaagacaattaattattcccgactacccctttatagcgagggcgttaccacggctaaatgatatatatcaatgtaaaagtgtgattttcacgtattctgtcgctaaatagcacgatcatatcgctatgtatatgtttatatagcgaaagcgtgatggcgaaattgtcatttacacgctagtatcggcgtaaccacagtaaacactctagcctctgcacctgggtcatttttgatacggtgctttggccgtgacaacgtttaacgtttgccaccagggcgcaggaagaaatgactccgcctcccgtatttggaaaggtgtacatggcttcacaacttaccgatgctttcgcgcgtaagttttactacttgcgtttgtcgattaccgatgtgtgtaactttcgttgcacctactgtctgccggatggctacaaacctggcggcgtcactaacaacggtttccttaccgtcgatgaaattcgtcgcgttacgcgcgcttttgccagtcttggcacggagaaggtgcgtcttaccggcggcgagccttcattacgccgcgattttaccgacatcattgccgccgtgggtgaaaatgatgctattcgccagatcgcggtgaccactaacggttatcgactggcgcgcgatgccgcgaactggcgcgaagcggggctgacgggcgtcaatgttagcgtggatagtctggatgcgcgtcagttccatgcgattaccggtcaggacaaattccgccaggtgatggcgggcatcgatgccgcctttgacgccggtttcgaaaaggtgaaagtcaacaccgtgctgatgcgcgacgtgaatcaccatcagttggataccttccttgcctggattcagcctcgccccattcagctacgcttcattgaacttatggagacgggcgaggggagcgatctcttccgcaaacatcatatttcgggtcaggtattacgcgacgagctgattaagcgcggttggatccaccagctccgccagcgcagcgatggcccggcgcaggttttttgtcatcccgattacgccggtgagatcggcctcattatgccgtatgaaaaagatttctgcgccacctgtaaccgcctgcgtgtttcgtccgtcggtaagctgcatttatgtctgtttggcgacggcggcgtgagtttacgcgacctgttacaggatgacgcgcagcaatacgcgcttgaggaacgtatttccgacgcgttgcgggagaaaaagcagacccactttcttcaccagagcaatactggtattacgcaaaatttatcttacattggcggttaatccttaataaggagatttcagatgagtcaggtcagcgctgaatttatcccgacccgcatcgctattcttactgtttccagccgacgcggcgaagaagacgacacctccggtcattatctgcgtgattcggcgcaggaggccgggcatgaagtggtggcgaaagccatcgttaaagagaaccgttacgcgattcgcgcccaggtttccgcctggatcgccagtgatgaggtgcaggtcgtattgataactggtgggaccggtttgaccgaaggcgatcaggcgccggaagcgctgttgccgctgttcgatcgtgaagtggaaggatttggcgaagtgtttcgcatgctctcgtttgaagagatcggcaccgcaactctgcagtcgcgcgcggtagctggcgtggcgaataacaccttgattttcgccatgccgggctccacaaaagcgtgcagaaccgcatgggagaatatcattgcgccgcagctggatgcccgtacacgcccatgtaattttcaccctcatttaaagaaataacgatgtcgcaattaacccatataaacgccgcaggcgaagcgcacatggtggacgtttccgcgaaagcggaaaccgttcgtgaagcgcgtgcggaagcattcgttaccatgcgtagtgaaacgctggcgatgattgttgatggcaaacaccacaagggcgatgttttcgccaccgcccgaattgccggtattcaggccgccaaacgcacctgggagctgatcccgctgtgccacccgctactgctaagtaaagtggagattcagcttcaggccgagccggagcataaccgcgtgcgtattgagtctctgtgccgtctgaccggtaaaaccggcgtcgaaatggaagcgttaaccgcggcgtccgtcgcggcgttaaccatctacgacatgtgcaaagcggtacaaaaagatatggtaattggtccggtgcgcctgctggcgaaaagcggcggcaaatcgggggattttaaggtggatgcgcatgattaaagtgcttttcttcgcccaggttcgcgagcttacaggaactgacgcgctggatcttccagcagatttttccaccgttgagtcgctgcgacagcatctggcgacaaagagcgatcgttgggcgctggcgctggaagatggcaagctgttggcggcggtcaaccagacgctggtaagttttgaccatccgctgacggcgggcgatgaagtggcgtttttcccgccagtcacggggggctaacatgcacgaaacgcgaattgtagtcggccctgcgccgtttagcgtcggggaggaatattcctggctggcggcgcgcgacgaagacggcgcggtcgtcacctttaccggaaaagtgcgcaatcataacctgggcgatagcgttaaggcgctgacgctggagcattatcccggcatgactgagaaagctctggcggagatcgtcgcaaaggcgcgttcccgctggccgctggggcgggtcacggtgattcatcgcgttggcgaattatggccgggcgatgagattgtgtttgtcggcgtcaccagcgcgcaccgcagtagcgcgttcgacgccggtcagttcattatggattatctgaaaacccgtgcgccgttctggaagcgtgaagccacgccggaaggcgatcgctgggtcgaagcgcgcgacagcgaccagcagttggcgaaacgttggtagcagaatgtgatacgctttagggtatcatttccacacaggagttcatcatggacagatttccacgatctgattcaatagtgcaggcgcggtccggcctgcagacctatatggcgcaagtgtatggctggatgacggtcggactgttactgaccgcgtttatcgcgtggtatgcggctaatacgccagccgtcatgatgtttgtcttttccagtaagatcactttctttggcttaattattgcccagcttgcgctggtgtttgttctgtcgggactggtgcataaacttagcgccggaatggcgacgacgctgtttatgctctattcggcgctaaccggattgacgttatccagtatttttatcgtttacacctactcctctatcgccagcacgtttgtggtgacggggggaatgtttggcgccatgagcctgtacgggtacaccactaaacgcgatcttagcggtttcggcaatatgctgtttatggcgcttattggtatcgttctggcgtcgctggtcaatttctggctgaagagtgaagcgctgatgtgggcggtaacctatatcggggtggtggtgtttgtcggtctgaccgcctatgacacgcagaaactgaaaaatatcggcgagcaaatagatacccgagatagcgctaatctgcgtaaatattcgattctcggcgcgttaacgctgtacctggactttatcaacctgttcctgatgttactgcgtatttttggtaatcgccgctaattatagcgatctcttaaaatcctggccctgcgccaggattttttttaggactatatttagggcgaaacagcataaatatcttagaaatgttttcctacgcttgccattcttatcaccgtgatcatgtgaagagtgataaatgacaagtgggacctctggctgcaatacgtatacgacaaatagcatttattccctcgacaatgttatcccttacctattggtatactgcgttgggactatggtgtaccgccggcattatatggttaacgttgtatagtcattttttaataacccacgttcaacctgttgttgttttgtggatatcagcacttttgcttggcctggggtatggggccattacctgtctttcccgctttggcactgttgtcgcaacgttgatatatattgccatcattacgcttaccggcgtgtcattagcttaccttttctcaggtggcgcgaccattttcgtgattgttggaatcatgtttagtcttaatgccttatttattttctacctgaatatcagttctggtctattcaggccgttaatttttatggcggtaagcgggatcatcgctgcgatagttgtcaatagcctggtggccagtagcactctggtctggatagtcagtgtgctgacggtattggtatggacattgattacagcactagaaaaatcgacacttcatggttatgcccgcatgttataccacagcgagttttcatcgctgcctcgttgcgctttatttggcgcgctgacgctttaccttggcattattaatgctgtggttacgctgtgtcgttatatcattttgatgattctggaaatactattatctttcaggccgtaggcgttgcaggttttttattcaggttggtgatgatgggtataatgagtaaattatgtggcaaacaattttggttagcgttttgtgaagctaaagacgtcactcgcgccattaaaaatggcggcgaggattttaataagaaatgcccaccagcgctgatttctcatttcattaccggattgtcatgggaacattcattacccaatcctgcgcctgtttgcgcgtttagttttatgcttcttgtgggaggtgtgtgcagtgcgcattttgtttttgataagtttatcctgtattggccactaaatataattatttattttggcagtgctataggtattatgctatgtgttatggccgaggtatggcttattgccaaaggctttattctggggttgcgcctctgcgttttactgtttttgttaaatattatgctctgcggtactggattatttgacgtgttgtgccatcaaaatagcgaactaaagagtgatcttgttatcgcgattattatggttgtgctttgccgctgggtgatgaatggcgaaacgtttacgatgatgattcgtttctgcctggggcgtcgattagtgcgagttgcattacaaaaatatctcacctcacagacaaggaaatgataagcccatgaacctgatgacgtggctaacaggaaaaacactggcggagctggtgaaaaaagggcagttgatcccgccagaaattaagttacctgtgtatccggccagccactacaaaaaaaactggtatgaacaaggtattcctcacggaggcgttattgggcttacggcgatcatgatgaccatgacatggatcgtcagtataaacatggttattgcgcagtttgagctgcacaataaaaagcatctggagctggtcttcttcctggccgtgggctatatcgcttttcttaccccgtcaaatcagctcctgcttaaaggaagaatgagcggggttattatttaccgctatgcgctattactggtcattatttccgttacgttggcaacgttctgtaccctgtcatcagtattcatgggcgagtttcacgaagtgctcctgctgctgtttagctggtcattgctgcttttttcccgcttacagatgaatacgtcttttttctcagcatatgtttatttttaccggataaaacgcgttgtgctggaaagcgaaaacgcgtctgcttaaatttatttcgccatcgcccgctcgtttttcgcccgcagcttcttcgcccggctctccaggatcagatagcacaccagcgccagcaacaggggaataaaatagtaaagcacgcggtatgcgagcagggcggcgataatcgtgccttgcgacgtatgttcgcccgccagcaacgcaaggaatacggcctccagcacgccgatgcctgccggaatatgcacgatgacgcccgcgatactgctcaccagcagtacgcccagcacaaagaaatagttcacatcctgacccatcagcagccagatgatggcgcccatcgccatccagttcgcgctggagatcgccatctgcgccagcgcgaatttccatgacggcagcaccagtttctgtcctttaatcgtcatatgccgccgcttcgcaaaggcgcaaaaccacagatagaccgcgataatcaacaataaaacgataccgagaattcgtagcgtgcctgcatcgatataccagtggtcgggaagctggacaatgccgaaggtaaaaatgatgccgccaagcagaatatagcccagccagttagtggtaatgctgagtgagaaaatgcgcgtgatagtactgccgggcaacccgaggcgagagtatagtcggtaacgcatcccgatcccgccgacccaggtgctgagcgtcaggttaaaggcatagcagacgaacgataccaacatcacctgtcgcttcgccagtttatggccgcaataaagccgtccaagcaggtcgtagcagccgtacagaagatagctaacgatcaccagtcccacagcgcttaaaagcgccgtgcggttatagtcacggatgacggtccagacatcgccccagtcgacctttttagcataaaccaccagcagaacgacgaccgcaataaaaaacagccaggtcagcacttttttagccagccgccagcgcggatgcgatttagccattagggcttcactcctgtattttctggatcaacgcgatcctgggtttccatttctggctgggcaggcgggggaacctgcgccagatgcggggtatgcgccggtagccagccgaccagcgccgggaaatgacgtaaaaagtggaacgccagcacgcttttggtcaggttccaccaggtgcgtttcggcagcatagactcatcgacctgcttacaatcgttcacgatgatgccttgtaagttatcgcgcagggtctggttaaaagtacgatcgtgaatgatcaggttagcttcaaggttaagcgacaggctgagcggatcgagattactcgaccctaccgtggcccagtgatcgtccatcagcgccactttgccatgcagcggacgtcgtcggtattcataaacctgcacaccgcccttcaccagatagttatagagcaaccgcgcgccgactttgactatcggcatgtctggttccccctggacaatcagttttacgctcacgccacggcgggcggctttacgcattgcgtggagcaagcgatagccggggaaaaaataggcgttagcgataatcacttcacgctttgcctgggtcagcattttcagataatgacgttcgatatcgtcgcggtgttcttcattatcccgccagacaaacagcgcctgcgcttcgccggggtggcgattttcttcagcctgatgatggcgcttccaccagcggcgcgcggggctttgccccggcagattctcgacttcgaattgcaggatatcggccactacaggcccttcgacccgtaccgcgtagtcttgtttcgcctgcgggccgtaatccgacatatgttcggcggagtagttaatgccgccgacaaaggcaatacgatcatcaatcaccacaattttgcggtgcattcggcggaagatattggttcgcaaccccagtagacgcgggcgggggtcgtaatagcgaaaaatcacgcccgctgaggtcaattcgccgacaaacgcgtcgctgagatcgggagagccgtagccgtcgagtaatacttcggcttttacgccgcgctgtgcggcttttagcagagcggtatggagttttttacccacctcatcttcaaacaagataaaggtttccagaatgattttttgctgtgcctgagcgatagcctcaaacacggcaggatagaactggtcgccgttttccagtagctgaatttgattaccttcacgccagccgcatttcatagatggatctccgcgctaaggggggcatggtctgataaatgtcgccagttccgcagcggcagcgccgtaggagaactggcgttcgcattcttgacgtaaatacgatcgagtcgcagcagcggcatactcaccgggaatgtgcgcgccggtcggccatgggcacgggtgaatatctcctccagcccggccgcgtttaacggcgggccggccttttgccgccagtcattaaagtctccggccaccagcaccggttctgattccggcaaggcattcacccatcccgccagcatggttagctgtgcctggcggtgactctcccgcaggccgagatgtacgcacatgacgtggatagggcggttgagcatgggcggcgtaatgcggcaatagagcacgccgcgtttttcgctaccgccgaccgagacgtcgcgattttcataatgttcaatgggatagcgagaaagaaccgcgttaccgtgatggccttccggatagaccgcattgcggccataggcgaaatcgctccacatggtgtcggccaaaaattcatagtgggtagtgtccggccagttttcgatatgcagcggatgtacttcatgcgcgcccatcacttcttgcagacagacgatatcggcgccgaccgttctgacagcgtcgcgcagctccggcaggatgaagcgtttattaaaggcggtaaaacctttgtgcgtattaattgtgagcactttgaatgaaaaatttcgcgtgtgttgagtcattttcttcctgtccgcgtcactatcctgattgaaatagtgtagtcgtcgtcacaaaaagatgcggtcttacggaattttccgtaaagttcggtactctgaataatgagagaaaaatgcttcaggagaaaagccatgaagtggcaacaacgcgttcgtgtcgcaaccggcctcggttgttggcagattatgttgcatttactggtagtggcaatgctggtaataggctggatgagcggcacattagtgcgcgtcggcctgggattatgcgtgctttatggcgtgacggtactgctgatgctggcgttgcagcgccatcatgagcaacgctggcgcgatgtggcggatgtgctggaagagctgactaccacctggtacttcggcaccgcgctgattgtcctctggctgctatcccgcgtcttgcaaaacaatgttttactggcgctggcggggctggctatcctggccgggcccgccgtggtctcgctactggcgaaagataaaaagctacatcactttgcgtctaaacatcgcatacgccgctgaacccgtggtggccgctatcaccagtagcggccacaaacttccccagacaatccccagactcgcgtccttaagataaatttgcttagtaatatcagtaaagtggcggataggatttatccacgtcaggttttgcagccagaccggcatattttccaccggcgagacataacccgagagcaaaatcgccggcatcataaagacaaagacgccgataaacgcctgctgttgcgtggcgcaaagcgatgatatcagcaagccaaagcctaccagcgacagcccgtaaatcaccatcgtgaaataaaacagcgctaacgaaccggcgaagggaatttggtatgcccaaatgccgatagccagcacgatcgtggcctggaaggtcgcgacaatcagcgccggcaccgctttaccaacgaaaatctgccaggtggtgagcggagagaccagcagctgatccagagtgccttgttcacgttcgcgggcgacggacagcgaagtgacgatcatcacgccgatagtggtgatcatggcgatcagcgagggcaccacaaaccacttgtagtccagattcgggttataccagttgcgtaccaccagttcgctattgttgggctttggcttgccgtccatcaatgtctgctgatactccttgacgatctgttgcagataattggcggcgatttgcgcgctgttggagttacgtccatcaagaatgagttgcatcggcgcaggctggaaggtatccagattccgcgagaaatccgccgggaagcgtaccagcagcagcgctttttgcgtatcgatagtcggctggatctcctgcggactgttcagcaatagcacatgggtaaacgctttcgcgcgggcaaagcgctgggtaagttctaccgaatgtttgccgttatcttcgttatagatggcgatagtcgcgttagtgacttcaagcgtcgcggcgaacggaaacaggatgacctgaatcagcaccggcagaatcaggatcgcgcgcgtttgcggttcgcgtaaaagcgattgcagttctttgcgaattaacgtccataagcgatgaaacatgtccgtcctctcagtccagtttgtaggcctgataagcaaagcgcatcaggcataatgccggatggcggcgtgaacgccttatccggcctacgacgacaattatccatacacatatttaatccagccgtcgtttggtttttagccacgtcaggccaataaacatcaccgccgaggcgattaaaaacagtacgttaacgcctaacacgaccggaatattgccggccagaaacagactttgcagggtgctgacaaaatagcgcgccggaataatataggtcaccgcgcggatcaccgcaggcatactgtctatctggaagataaatccggacagcataatcgagggcaaaaacgcggcgttcagcgccacctgcgcggcgttaaactggttgcgagtgatggtggaaatcaacagccccatccccagcgtactcagtaaaaacagactggtgatgataaacagaatcaccagcgaaccgcgatacggcacgccgagaataaacaccgataccagcatacagagcagcatcgccagcataccgagaaagtaatagggaataagcttacacagcagcagttcaacacgcgtcacttcggttgagagcagcgcctccatcgtgccgcgctcccattcgcgggcaacgaccagcgaggtgaggattgcgccaattaccgtcatgataatggtcaccgccccgggaataataaaatgctgactgatcgccgccgggttaaaccagtagcgcgtctggacgtcgatgagcggttcaaaggtgtcgccgcgatcttccgcgcgctgctgttgccagatttgccagatgccttccacataaccctgaacgaagttggcggtgtttggctcgctgccgtcggtaatcacctgaatcggcgcgctgtcaccgtcgcgcgccatttgctgcgcgaaatccaccggaatcaccaccagtccgcgaatgcgtccggcctgcattttttcaattaattcatggcggttatcgctaatggtcgcgtcgatatagggtgaaccggtcatcgcatgagtgaaatccagcgcctcctggctttgttgttcaagcagaatccccacccgcagtttgctggagtcgaggttaatgccgtaaccaaaaataaacagcaacagcagcgggatcaccaccgcaatcagccagctactgggatcgcgcacgatctggcgcgtctctttgacgcacaacgcacgcacgcggcgccaggagagagacttactcatgcgtatgctccttatcccagtcattgatgagagtgataaaggcctgctccatcgttggatcggcctgttgctcatcggcggcctgcgctttgagatcgtccggcgtaccgctggcgataagcttcccgcgataaaccagtccgatgcgatcgcaatattccgcctcatccataaagtgggtcgtcaccattaccgtgacccctttttccaccatgctattaatatgcagccaaaattcacggcgggtgaggggatcaaccccggacgttggttcatcaaggaataaaatatccggttcgtgcatcagcgagcaggccagcgccagtcgctgtttaaagcccagcggcagcgcatcggtgggatgcgacgcgatgcttttcagaccaaacgcttcactcatgcgctgaattttttcattttgcgcgcggccccgcaaaccgtagacgccggagaaaaaacgcaggttctgctcaaccgtcaggttgccgtaaagcgaaaatttttgcgccatatagcccagatgctgacgggctttgccggagctgactttcaggtccatatccagcaccagcgccttgccggacgtcggcaccagcaggccgcacatcattttaaaggtggttgatttacccgcgccgttcgggccgagcaggccaaaaatctcgccgcgctgtacgacgaaattaacatggtccgtagccgcgaaatcgccaaattttttcgtcagttcctgcgcttcaatcaccgtttcgccggcagtgccttcaaccgtatgcaggattgaacccagcggagactccgaggttcccgctccgccaagcagatcgataaacgcatcttcgaagcgcggcgcggtctcattgagggtgatttccggcatcccttcggcctggcgaatatctgctgcggtcgcctcttttttcaggatcaggcgtaccgaacgtccctgaatcatgccgtcgctcacctgcggcagtctgagcgctctctgtagcaacttacggttgttttcctgtggactactcatcagaaagctacgaccggccatcgtttgcgtcagcgctttaggttcgccctgatagagcagctcgccttcattcatcagcagcacatcgcgacactgttcggcttcatccagataggaggtgctccataaaatcagcatcccgtcgcccgccagttcgtgaaccatttgccacaactcgcgccgtgaaatcgggtcaacgccaacgcccggttcatccaacagcagcactttcggttcgccgaccagcgtacaggccagccccagtttttgcttcatcccgccggacaatttccccgccagacggccagtgaaagggccgagggcggtaaattccaacaaacgggcaaaggtcttttcccgtatctcgccggtaacgctgcgtaaatcggcatagagattaaggttctccatgacggtaagatcttcatacagaccaaatttctgcggcatatagcccagaaccgcgtgcagctcgctgtcgttttgtatcgggtcgaagcccaatacggacgcgctgccgccatcggctttgagcaggcctgccagcatacgcattagcgtggtttttcctgcgccgtccggccctaccagcccggtgacataaccggaatgaatggtacagtcgagcggcgcgacggcgggtttatccattcccgcaaagcgcttcgtcagaccgtgcagcgtaataacggcctcactcatgccgtgcctcgtcattaaatttcaccgtgactggcatcccctggcgtaacgcatcgtccgcatcggtgacgataatgcgcaggcgatagacgagatcggtacgcagatccggcgtttcgacggttttcggcgtaaattccgcggtgggcgaaacgaaaccaatcttgccgtggtaaggtttgtcaggacgaccgtcggtatacaacagaatgtcgcgccccggttgcgtctgactgaggttgcgttcatcgacataggcgcgcacccagacggggcgggtcagcgagagcgttaataccgtgctgccggcgttcagcatactgccaggctcgaccgcgcgggtgagcaaggttccgttggcaggcgcgataagcgtggtgtcctgcaaatcaagctgcgcctgcgccagttgggcctttgcctgttccaggctggctttcgcctgggcgatatcctgttcacgattaccggtacggtactggctcagtttatcctgcgcggacttcagcgtcgcctgcgcctgatcgcgcgatgagcgggcgttttccagatcgttagcggaaatggtgcggcttttccacaatccttgctgacggttataaaagttttgtgcgtagtcataggcggcttgcgcctgtctgacggcggcggcggcctgggctatctcttcatcgcgatagcctgccagcatcaaatcatattgcgcctgcgcgaccgacacgccagctttcgcctgcatcagcgcgttttcgtatggcgcgtgatccagttcgccgagcacctgtccggctttgatagtatcgccttcatcaacattcagcgacgccagcctgccgccgacgcgaaagctgatattgacggtacggatatcgacattaccgtatagcgtcagcccatcgtcctgccgactttgataccaccaggttccaccggcaatcacagcgacgatcgctgcgattgccagtccgataacgacaggttttttcatcagtccagactcctttgcgttaaaccgtgcagaataagatcgatgtggcaggttaccgtctggtaaatcagctccgctttttcttcatcaaactgcggccagccggtacgtaacagaatagtttctttgccgagacgaaacgccagcacttcgcccagtaaggcatgggtatgcaaaatcatgcgcgtatcattggcgtcgcagccggtataagcggcaaccaatcttgtcagatgggtgtgcaacggatcgataacctgttcatggaccaattgataggccgacgtgggagagagctgctcgcgtgaaataaatttgctcaggttaacggtgtcttcctgcgtcagcagcataatcatgttcttgcaggcgagcagaatgagttcgcgtatggcgtcccggtcaggggcaggctggctaaacagacgctccgctttttcagcatgcgggcgaaatttttcgccaagaaaatcggcaatccactgggcgcaggcgaggtataaatcctcttttgagccgaaatagtaagtaatggcggcaatattttgccccgccagcgcggcgatatcgcgcgtggtggcatggaggccatactcgccaaactgcgccagcgcggcggcaatgagctgacttttcgcctgctcgcccttggtggtcgtggtgggaatattcatcacacgccctaatttttaatcaatcgattgattaagactatgactcataatggcacttgtccagtgtggtcgattaatttgtctttgctaccttccgggataatttatgcgccgcatcacaaaaactgctacactccgccccttcatgacattgtggtttttgtcattccaaatttgagcatctccctgaaaactacaccggcaacggtcggggcggtccggagtagttatgtcttttgattccctgggattaaaccctgatatcctgcgcgccattgccgagcagggttaccgtgaacctacccctattcagcaacaggcgattcccgccgtgctggaaggccgcgatctgatggccagcgcccagaccggaaccggtaaaacggcgggttttaccctgccattgttgcagcatctgattacccatcagccgcatgctaaaggtcgtcgcccggtgcgtgcgttgatcctcacgccaacccgcgagctggcggcgcaaattggcgaaaacgtcagagattacagtaaatatctcaatattcgctcgctggtggtatttggcggcgtaagcatcaatccgcagatgatgaaactgcgcggcggcgtggatgtgctggtggcgacgccgggacgtctgctcgacctggaacatcaaaatgccgtgaagctggatcagattgagattctggtactggatgaagccgaccgtatgctggatatgggcttcattcacgacattcgtcgcgtgctggcgaaactgccggcgaagcgtcagaatctgctgttctccgccacgttctctgacgacatcaaagcgctcgccgaaaagctgttgcgcaacccgctggaaatcgaagtggcgcgccgcaacacggcctcagagcaggtaacgcagcacgtgcactttgtcgataaaaaacgcaaacgtgaactgttgtcgcagatgattggccagggcaactggcagcaggtgttggtcttcacccgcaccaagcatggcgcgaaccatctggcggaacagcttaataaagacggtattcgcagcgcggcgatccacggtaataaatcgcagggcgcacgtacccgcgcgctggccgattttaaatccggcgatattcgcgtgctggtggcgacggatattgcggcgcgtggtctggatattgaagagctgccgcacgtggtcaactatgaactgccgaacgtgccggaagattatgtacaccgtattggccgtaccggtcgcgcggcggcaactggcgaggcgctgtcgctggtctgtgttgacgagcataaactgttgcgtgatatcgaaaaattgctgaaaaaagagatcccacgcattacgacgccgggctatgagccggacccgtcgattaaagcggagccgattcagaacggtcgtcagcagcgcggcggcggcggcggtcgtggacgcggacaaaatcaggggggagcggggcgcagtcagcagccgcgacgtcaggatagtggggcggcgaaggcgaaaccaaaaccgcgcacaggcgaggggaaaaccgctggcgacaaagcacgtccgccgcgtcgcccgcgcagaatcacgcctgcccagtaaattttatccggcaacatgcccggtagcgcgacgcttaccgggcctacggactatgcaaatacgtaggccggataaggtgcttgcaccgccatccggcaaaatacacatcgcgttgcgagccgccttccagaaccggtaaaaaaggtacttcccgcccctgaaatgtgacacaatagtggctgtttatacagtacttcaggttttctcatggcattgaccgctgcgctgaaagcgcaaatcgccgcctggtataaggcgcttcaggaccagattcccgactttattccccgtgcgccgcagcggcagatgattgctgacgtcgccagaacgctggccggggaagaagggagacatctggctattgaagcgccgaccggcgtcgggaaaaccctctcctatcttattcccggtatcgccattgcccgggaagagcaaaaaacactggtggtcagtaccgctaacgtggcgttacaggatcagatctttagcaaggatttgccgctgctacgaaaaatcatccccgatctgcgctttaccgccgcctttggccgcgggcgttacgtgtgtccgcgaaacctggcggcgctcgccagtagcgagcctacgcagcaggatctgctcgcctttcttgatgatgaactgacgcctaacaaccaggaagagcaaaagcgctgcgccaggctgaaaggggatcttgacggttacaaatgggatggtctgcgggatcataccgacattgctattgacgacgatctgtggcggcgattaagtaccgataaagccagttgtctgaaccgcaactgtcactattaccgcgagtgtccattctttgtcgcccgacgtgaaatacaggaagcggaagtcgtggtggcgaatcacgcgctggtaatggcggcgatggaaagtgaagccgtactgccggaaccaaagcatctgctgttggtactggatgaaggtcatcatctgcccgatgtcgcgcgcgatgcgctggagatgagcgcggaaattaccgcctcctggtatcgcttgcaactggacctgttcagcaaactggtggcgacctgcatggagcaatttcgccctaaaaccacgccgccgttagcgaaccctgagcgacttaacgcccattgcgaggaggtatacgaactgatcgcctcgctcaatgccattcttaatctgtatatgcccgcagcgcaggaggcggagcaccgttttgcaatgggcgagttgcctgatgaggtcatggaaatctgccagcgactggcgaagctgaccgagacgctgcgtgggctggcggaatcctttctcaacgatctcagcgaaaaaaccgggtcgcacgatattgtgcgtttgcatcgggtgattttacagatgaaccgggcgctgggaatgttcgaggcgcaaagtaaattatggcggctggcttcgatggcgcagtcttcaggcgcgccggtgtccaaatgggcgacgcgtgaaatacgcgaagggcaactccacgtctggttccattgtgtcggtatccgcgtcagcgatcagctggaaagattgttatggcgcagcgtaccgcacattattgtcacctcggcgacactgcgctcgctcaatagcttttcgcgcctgcaggaaatgagcggcttaaaagaaaaagccggcgaccgctttgtggcgctggattcgccgtttaatcatgtggaacaggggaaactggtgattcctcaaatgcgctacgaacccaccattgataacgaagagcagcatattgccgaaatggcggcctattttcgtgagcaactggagagcaaaaaacatcatggtatgctggtactgttcgccagcgggcgggcgatgcagcgttttctggagcatgtcgctgatgtgcgcttactcctcctggtccagggcgaccagccgcgttaccggctggtagagctgcaccgtaaacgggtggagagcggcgaacgcagcgtgctggttgggcttcagtcttttgccgaagggctggatcttaaaggcgagctgctgacgcaggtccatatccataaaattgccttcccgccgatcgacagcccggtcgtgatcaccgaaggcgaatggctaaaaagtctgaatcgttatccgtttgaggtacaaagtttaccaagcgcgtcttttaatttaattcagcaggtagggcgattgatccgtagccacgcctgtcggggagaagtggtcatttatgataagcgtttgttgaccaaaaactacggacagcgtttactgaatgccttacctgtttttccgatagagcagcctgccgtgccagacgttatagtaaaaccaaaagcaaaacctgcacgccgccgacggcgttaatgctgtgagcacacttcaaggagctttcaatggattatcgcaagatcatcaaagagatcgggcgaggtaaaaatcacgcccgcgatctggatctggataccgcgcgcggtttgtatacccgaatgctgaatggcgacgtccccgacctggaaatgggcagtatattgatggcgctgcgtattaaaggcgaaggcgaagccgaaatgctgggcttttatgaggccatgcagaatcataccatcaaactgacaccgcccgcagataggccgttgccggtcgttattcccagctataacggcgcgcgtaaacaggcgaatttaacgccgttgctggctatcctgctgcataaattgggcttcccagtcgtagtacacggcgtcagtgaagatccgacccgcgtactgacggaaactatatttgagctgatggggattatccccaccctacacggtggacaagcgcaggccaaactggacgggcgccagccggtgtttatcccggtgagcgcgctctgcccgccgctggaaaaacagctggcgatgcgctggcggatgggcgtgcgtaacagcgcgcattcactggccaagctggcgacgccatttgctgaggatgccgcgctgcgtttatcaagcgtttctcatcctgaatatgttccgcgtgtggcgaccttttttagccgcattggcgggcgggctttgctgatgcatggtaccgaaggcgaagtctatgccaacccgcaacgctgtccgcaaatcagcctgattgatagccgcggcgtgcaggtactgcatgagcgccagagcgacacgtacgacgagccgctttcactgcctgcgactaaagatcctgaaatcaccgcgcgctggattgagcgctgccttgccggccacgagccggtgccgcaatcattaaaaacgcaaatggcctgttgtctggttgcgacgggagaggcggcgacgttagaagacgggcttgcgcgcgtcgaacaggcttttagcgaataaaaaaagcccgtccagtgacggacgggcaaataagggtaacaaacagggttaatgagggttggagcagtgggtctgttggcaaacagacgagggtaatacccgtcagaattcaaacaacagcgatgttacagcctgaaatctggcgggcaggtaaattatttataaatcaccgcagtgccgctcattttgtcattacctacggcggaggtgatgttataagcgcttgcgccagcagcggcggctttttcagccagtttagcttccaggccatccagcgtggtggcgccatcggcagacactacgccgattttatgcaggttttgcgtctgagacgcgctaaccggttctgcggcaaaagcgccaaaagaaagggtggaaagcgcgatggctgcaacagcatatttaatggttttcatgattaatctctcgcaggttattctgtttatgggacgatgttccgtcgatgtgatgagtatcacggttttttgcgaaagataaaatcgaatagaattgactgccttgctcaaaatttttgaatgacaaataacctattgattattaattaattcaacggttgaatttacctttcttgtcatctggctttacagagtcgaggttaacggcacattctgcgacgcagaacgctaaaaagcatgagcgtaaaggaatggataatactggcggtttcggtaaagaaaagtcagcgtaactggctgtcttttgaacctctacgattatatcctgaaaatgttgcgttatgtaaatctttctcctgttggcaggctatgcataaccgaacgcccggcacggctttacgccgcgcttcagggataggatcgccgcaagattcgcattcatcgcgactttcgccgtggggaagttcgccgcgagcgcgggcaacggcatcttcaatggtattgttgatttgttcattcactgcgtcgtcatttgcccagccggatgccatcacgctctcctgattttagggtacctgaggttaagtgtagcgccgtcaggcgaaaaaatcgcatcgcgcggccttttcagaccatgagcagagccaatgtcattcagagagccgatcaaacgagcgaggcagggaattcgcggtggtatatttaccccgtggcgttatacgggtatcttacgccgctgctaaaaggagaatgccatgtccgcccagaaaccggggttacacccgcgcaaccgccatcaacaccgttatgatctcgccgcactgtgtcagaccacgccggaattgacgtcctttcttatccgcacgcccgccggtgaacagagcgttgattttgctaatccgcaagcggtaaaagcgctcaataaggcattgctggcgcatttttatgccgtcacacactgggacattccgccagggtttttatgtccgccggtgcctggtcgtgcggattatatccatcatctggcggatctgcttggcgaaacgacagggagtattccggcgcaggcaactattctggacgtgggcgtgggcgccaattgtatttatccgcttatcggcgtccatgaatatggctggcgatttaccggtagtgaagtcagcgacgcagcgatgtccagcgcgcaggctatcattcaggctaatacggggttaagccgcgccattcgtctgcgtcggcaaaaagatccggcggccatttttaccggtatcattcataaaaatgaattttatgacgcaacgctttgtaacccgccttttcacgactccgccgccgcagcccgcgcgggcagcgagcgtaagcgccgcaatttggggcagaataaagatgatgcgctgaactttggcggtcaacagcaggagctatggtgcgaaggcggcgaagtcgcctttattaaaaaaatgattgctgaaagccaatccttccgccgtcaggtgttgtggtttacgacgttggtgtcgcgcggcgagaatttaccgccgctttaccgggcgttgacggaggctggcgcggtgaaagtggtgaaaaaagagatggcccaggggcaaaagcaaagccgctttattgcctggacctttatggatgacgaccagcgtcgccgttttatcacccgtaaacgctaaatcgtcggttcgcgcggcggcagcgaatcaggcgacgggccgccgacgggggcgggcagaacctgatacgtttgcaccggcgcgcgcacattagccagatcaaaatgctttttcacctggctatcaagggcaaaacgcaccgtccactgcttgagcggtagcgtggtgaacgacacgcgtaaagtaaacgccgtgttcgttaaactgacaataccggcgaacgtgggttcgccgataatcagcccgcgaatatcctccgtctccatcagcgccgttaccgcgtctttcagcgcctgattcgctttatccgcatcctcatggcgatccacgtcatagttggcgacaacagagccgataccgcgcacaaagttggcgaaagtggtgatcgaggaccacgggataatatggtatgccccggtatcctgccgcacgccgacggaacgaatcgacattctttcgaccgtccccgtcagcgggcctatggtgactaagtcgccggtattcatcccgttttcaaactgaataaagacgccggtgataatatctttcaccagggtttgcgaaccgaaagagatagccagacctaacgcgcccgcgccagccagcaatggcgcgatattgacgccgatttccgataacacgatcatgatggttatggtactgataatcactgccagcgcattgcggaacagcgtcagcagcgtgcgcgtgcgggcgctgggtagcgggcggccatgaatatcggaggccagacgattctcaatcagactggcgaggatcgtccatcccacggcggagaagaataagattaacgcgatacggataaggatatcgaccatcttttcccccgcgccataatgtagccagtgccagaaatcgaatagcccccaggcgttgagcaacagcataacggcgacgcagacggtcaaaaagcgtgcgacttttagcgccgaggagagccagccgttaagccgcttttgtaattccgggtaattgcgctgcgtatggggcgacagggtgatggttttcgctatccagcgggtaaacataccggagataaacgccgcgatgccaataatcgccagactgcgcacggtcgcgcccatcataaacttcaggctattgcctgggtcgaataacgagaagaaaaacagcacgataaagtaagcgctggccagccagtgccacaccagcgcaaaggcgcggataaacaggctaaaaaaggctaatgatcgttccgccagacttaataaatgttgcgtaatctccgctttgtttttaaagatcaggtacagcgcccagatggtgatgcagagcatgatcgccacattagccatcgcgccaacctgaacattcacctggttggaaataatcggaacggcaacaattagcccgtagccaatcaaactgctaagggaactcatacggcgattccagtaacgcgctgtcgcatcctgaatcgcgaatgggcgtaattccggtacattagggcaaaaaataagccgcagaatcgctttaaagaactctattagcgcgaaggcattcaggaacaggctttgctgaaaagcgatagttcgacttcccgcatggaaattatcactgagcatctgaccgataaataaggtgagcgccagtagcaggaggtcgataataaacgcgccgacgatcatcgccgggagctgtaaccagttgctgcgttcacggtttttcttgcgtgcccacaggcccatttttcgatataacggcagggcgcaaagccgtatcacgctataaaaaccaaataccgcgacggccagaaataaaaagtgggttaacgcgttggtgaaggtttgcgagttaaacggcttgtgcggcgcatcggtgatgttgcgataaagctgggcgaaacgggtagcgaaagcatcgccgtactgacgggtaacggtggtgacgttctccagtaccgttttctcatctttggccgcaggcggcgcaagcgctggcgctggctcggtcggcggcgtggttgaggcttcgcggagttgcgctatcaattcgttacgtgaagcctcgttctccagtacgtcagccagggccgcataggccgcttttttttgttcaggactgggctctggcgctgcttgctggctggttgatgtccccgtggtcacgccgggtatggcgaccgcatgggcaggtgcgcccagtagacaaaaaaggatgaacagggtccaccgcatgactcctccagtgagaaaagagacgcaaaacactaagtatagatggcgcaggggagggaaaatgaaatgggactattccatgatgcccttcctgccgcagggctggaagggcgatatctcaggagacgtgctgtaaaaattcctgtaaacgtgggcttggcgggttttcgatcaacgcctgcggactgccatcttcggcaatacggcctttatcgataaaaatcagccgtgaggcgactttttcggcaaagccgatttcgtgagtgacaatgaccatggtcatgccttcttccgccagatcctgcatgactttcagcacttcatggcgcagttcagggtccagagcggaggttggctcgtcaaagagcatcattttcggcttcacggccagcgctcgggcaatggcgacgcgctgttgttgaccgccggaaagctcggaggggtagtggtgcgcccgttccgccagtccaactttcgctaacagagctttcgcctgtttttccgcttcttctttctttacgccgcgcacgcgcagaggaccgaacatcacgttttcgagcgcggtcagatgcgggaacagataaaactgttgaaacaccatgccggcttcctggcgaatcagccgttcgtctactttaggatcgttgactttcagaccatcgacaatcagatcgccggaggtgatctcttccagtttattgatacagcgtaataacgtggatttacccgaaccggaagggccgataatcacaaccacttcgccctgacggatgtttaaatcaatgttatgtagcacctgggtggggccaaagtgcttggagacgtttttaaattcaatcacaggattttcatccttctttcaagacgacgcaaaataaagctcagcaccagcgtaatgatcaaatagaagacggccacggcgctccagatttccagggcgcgaaagttaccggcaataatttcctggccctgacgggtcagctcggctacgccgataacaataaacaacgaggtgtctttgatgctaatgatccactgattgcccagcggcggcagcatacggcgcagagcaagcggtaaaataacatggcggatggtttcccggcgagaaaggcccagcgccagacccgcttcgcgaaaacctttgtgaatggatagtactgcgccgcgagtaatttccgcgatataagcgccggagttaatcataattgtcacgaccgctgcgctgaacggatcaatacgcaaatcattaaatgccatcggcagggcaaagtagataaacatgacctggacaacgatgggcgtgccgcgaataatttcaatgaaaaccagggcgatgtggttggcgaaccagccgccaaacgtacgggcaaaacctgccgccagtccaataaccaggccgccagccagaccgaggaccgagatccacagggtcattttagcgccctcaagcaaaagcggaatggcgggccagatggcgctccagtcaaactgcatatgtcgttcctgttaccgtggtgtaaatagtcaaatgctctatccggcgcggaaatggcggaaagtgtcttatccgtcacggaaagagctgtaggcccggtgagcgtcctcactaccgggccacaagccaacatcaggtcgttttatttaggttctgtaccgaaccattttttgtagatttcgttataggtgccattctcacgcagcgttttcagcgcgccgttgactttctcgcgcagttcatcgctgcctttcgggaaggcaactccgtattgctgtgcttccagcgattcgcctaccgccttgaactggccgttgcctgcggttttgataaagtacaggatgttcggcgtatcgtgcagaacggcgtctgcgcggttggtgcctaattccatgtacgcgttatcaatgttcgggaactgacgcaggtctttggttttgatattcgctttcgcgtaatccaccgacccggttccgctcttcacggcaacgactttgccatcgaggtctttaacgcttttaatatcgttattgttggctttcaccatcacgagcagaccgcttttgtaatagccatcggaaaagtcgatcgcttttttacgctcgtccgtaatcgtaatacccgccagcgccagatcgatatttttggtttgtaatgccggaataatgccgctgaaatccatcggtttcagggtgtagtccagcttcagttctttcgcgatagcgtcccacagatcaacatcaaaaccgacgtatttgtcgccctgtttaaattcaaacggaacgaacgccgtatcggttgccacaacgagtttcttatccgcagcgtgcgaagacaccgcaaaagccagggtaagtgcagccagtgaaacttttaatagagacttcatagcatttccttttctatccacggggcgatcccctgcgagaacatgtagcgtaatgaaaaaatcatgccaattatgtaactcattgttttaacagaagcgtgaaacattcctgtgcacaataagtcgggcaaaaccagtatgccgcaccgttttggggcactgatttagtgcatgaataacaaagtagagatacagggtctatttagcgtaaaaatcgttgttaaaacaatctttaattaacgattgtgtgatgtaattattacaaataattcacttttgtcggaggggagtacaagacgtgtgcactatttaagtgcaaaacccctgtgccaggcaggggtatagggatgacttatatacctgtgtacatcaagttgcaggtgcgttcgcttcagtgaccgacggaagtcaggcttctgcggattcgctgcgtttgtaccttcctgcaactcgaagtattcagggtagagatagatttattcgatgttggattcgataaaccacaggaatttatcgaggtcgcgtgatgcggcggtaaagatatcggcagtgtcttcatctttggcttcaccaatagctttgcgaacatcattagcgacaacagcgtagcgatcggccagttcttttaagtgatcctgcacgttatggatgtcgagcggatagcttttcagtggagttttgctgttgataacttgcgtggtgcctaacgccacaccgccaagctgtacggcgcgctcggccatagtatccagatgatcggtcagtgcggtacggaagccatccagcatctcatgaacggcaataaagttagcaccgcgcatgttccagtgggcctgtttcgtgatcagcgacaggtcaatgaactggatcacctgacgattaagcaactcaaccgtcgcttttttatcgctctctgatacatcgttacgggtataaagcagattagacgcttttgtttttaccagtttagcggtactcataatctcatatcctcttgatgtttgtgtcccaggtaattaacgaaaataagtatagcaccggtttttaactttgcttttttgaatttacctatcactttaatagtacagacaagatttaatatttattttgattaaaaatcaattggttagacgagtttgctgtttggtgggtaataattctcattttaatgtaaaaaatgagaaaaaatatgacaaaaaatgacgaagtaatagcgcaataataaaaggtgaataacgaggtgatattctgcatgattatgcacatcatgcagaataagaaactattttacgtcaacttgtttaatttgcggttcgcgtcgaatcgttagggtagaacccattgaggcggcaatgatggcgcacagggccaggatttgtatgcccgtaagcgtttcgcccagaaaaatcatcccggaaacggcggccagcgcgggttccatgctcatcagcgtaccgaaggtgcgggttggcaggcgcgtcagcgcaatcatttccagtgaataaggcagcgccgtagaaagcacagcgaccgctaaccctaagggaagaatcgaccagtgccatagcgcgtcgccagcctgaactgcgccaatcggcacgaaaatgatggcggcaatcagcgagcctaccgccaccgtggccggaccatgttccgcgcctgctcgctggccggtaagaatatagacagcccaacaggcgccagcgccgagcgccaacgcggccccggtaagatcgacgtgagacatatcttgtcctaatggcagcaggaaccagagcccaagcacagccagtacgacccaaataaaatctaccggccgccgggatgaaaacagcgcgaccgccagaggaccggtaaattccagcgcgaccgcaatacccaacggcaccgtctgaatcgacagatagaatagatagttcatcccgcccagcgacagaccataaaacaataaaggcagccgctgctctttggcaaaacgcaaacgccagggtttgaaaaaggcgataaggataagcgttcccaacgccagacgaagcgccgttacgcccggcgcgccgacaagaggaaataacgatttcgccagtgaagcgccactctgaatagaggacatggcaatgagcaaaaccaaaatgggcaaccagactggtagtttacgtgttgaccccggcatcctttctcctgtcaaaaaatgtcagtacgagtaaaggtggcagtgtaatggaaattccccgcggcggttgagggttcgttgaaaaaaaatttccaggattccataaaatgaacttaaattgatggataaatagactgttagtttaggaataatctggatgaatgtatcgcgccgcacgcgcattattggtgcaataagccggaaaagtgatgttaattgaataagatagcgcgatatggaaacgttctgttacatgaaaggcgcccttagacaccgtgaatcgcaaagagtttcccattaatttttgatatatttaaaacttaggacttacttgaagcacatttgaggtggttatgaaaaaaattgcatgtctttcagcactggccgctgttctggctttttccgcaggtactgcagtagctgctacttctaccgttaccggtggttacgctcagagcgacgcgcagggcgtagcgaataaaatgagcggtttcaacctgaagtatcgttacgagcaggacgacaacccgctgggcgtaatcggttccttcacctacaccgaaaaagatcgtactaacggtgcgggcgattacaacaaaggtcagtactacggcatcactgccggcccggcttaccgtctgaacgattgggcaagcatctacggtgtagtcggtgtgggttacggtaaattccagacgaccgattacccaacctacaaacatgacaccagcgattatggcttctcctatggcgctggtctgcaattcaacccgatggaaaatgttgctctggacttctcttacgagcagagccgtattcgtagcgttgacgttggcacctggattgctggcgtaggttaccgcttctaatcacgtcggtgaaaatgaaaaatccgcctttcggggcggattttttttgcctgaaacgtgcattattttagtgaaaaaatatcgctgcccagatggttatagtccactttctgtaatttgaaattggtgatataaacgggcccggctttctgttccgaaataaatcgatagcgatttttgatctctttagcgctaattcctgtccattgcgagaaaaaactcaggaaatcgttcgcggaacggcgagctttaatgatccgatgcgctttactgtcgctggatagcaccataaacggcacctggaagttttgctggaatttgtcgtcatgcgccaggtactgtaccgctttgccgcgctctttaaacgccagcccgtgatcggagaaatagacgagcgaaaaactgtcgccgctatgacgaagctgagtatagagctgacggagcaaatcgtcggtttgcgtcatggtgtataaataacaagacgtctctttcgactggacaaacgtcgcgtattttccctgagtacggtcgcaggcctggggatgcgaccccattaaatgcaacacaatcaactgcggttgcgtgcgttctgtcgccaatacctgcgccgtcatggttaacagcgcttcgtcgcgagtatttttatccgcttcaaaatcgccgtttttcaggaaatgcgcttcatcggcgcgtttggcgatactggcgatggccgtgtcgtattcgccgatttgcccctgattggaaaaccaccatgtctgaaaaccggcgcggttagccagcgtgacgaaattatcctgatactgtggtttgttatccaccacgcgattgagcgttaaaccgagcgatttttgcgttgagccgctggcggcgatgtaatccataaagaagtcgccattcacatggctggcgaagggggtattatcccagtggccgccgaaagcgcccatggcatcccgtcgcgcgctttcaccaatcaccacgacatagatgtgatatctgggtttcaccgcagtaaccgtccagctatcttttatgccggatagctgcgccatacggtgctgctcttcaatgacttcgttgttattgacgataacgtctttggcgaagcgaaaaaccggatagccggtatcaataaccttaaaaacgccgccccacgccagattttgtaccggcgcgacgaaaaatgccgcgacgctaatcagcaggcacaggctgtcgaggctattccagcgcggcctggcctcttcttttcggcggcgaagcgcaataatacccagcgcaaaaataaaaagtccggtcaggtagctataccacgggaagatggtcaggatttcgctcgactcttccatattggtggagtgcagcgccagcagcgtattaaagttcggcgcgccgtaagcctggccaaagggaaaatagcaagcggctaccagcgaacagatgccgagcagcgctttttgtccgcggggcaggtagcgccagagcaacagcaacaggcaggtaaacgccgcggtataaagcaggctaaaggggtagccgagcgcgaggttaatcagcagcgactgtaaaaagtagaggcccgcccacgggcttacagcccgacgacgggccagaagtgaatcgataagggttgaattcatatgccactattgcaaaaacgccatgtgctaaccctggcgcgaagggtcattacctgcctgattatgcgtaaaaaaggtattgggttcgcaacggcgagtcgcaaaatattcagggctgccagaagatagagcgtgcgggtaagaaggtcaaccgccggaaagaaaatgttttgcgaagagaatagcaaaaccacaaaaaaacaggggaaatgggcgccatttccgttgaggatgcaaaataaagcggcgtaccgcaccgccgcgttatttcgtggaagggttatcctgctccggtttgccgttgatcatatcgcacaacatagagagcagcattaaccggactttaaagggagagtgactgaacacgcgtatacacctcttaaattcgttcatataaacctcctgatgtttctatcccatcgatccgtgagggatgtctgcattacatacagatatagcacaggctatgttttatagctattgctaaaacgttaattttttgtgcccagacaactctggtttacaatgagcgctctgtcagctgacgcgttaacgcgtcacagaaacgaggaagcaaaatgggtcgtcgcgcaggtacgccaacaacaaaaaaagtgacgcaattggtgaacgtagaagaacacgttgaaggatttcgtcaggtcagagaggcgcatcgccgtgagttgatagacgactacgttgagctgatttccgatttaattattgaggtaggggaagcgcgtcaggtggatatggcggcgcggctcggcgtctcccagccgactgtggccaaaatgcttaagcgcctggcatcgttaggatttattcaaatgatcccctggcgcggcgtttttctgacgccggaaggggagaagctggcgcaggaaagccgcgagcggcaccaaattgtcgaaaattttttactggtattaggcgtaagtccggagatcgcgcgtcgtgatgcggaagggatggaacaccatgtcagccaggagacattggatgcctttttggccttcacgcaacagcatggaacatctgcagaatgagtctggcctttttacgggcgctgcggcgtgaccgtttttttcagttgttgatcattgtggggatggcgttaagcctgtttgttccttttgcgccccgcgcctggcctggcgcgattgactggcacaccattattaccctcagtgggttaatgttgctcactaaaggcgttgagctgagcggctattttgatgtgctgggacgcaagatgacgcgccgatttcataccgagcggcaactggcgatgttcctggtgctggctgcggcggcgctgtcgacctttctgacaaacgatgtcgcgctgtttatcgttgtgccgctgacgataacgttaaaaaaactgtgcgcgattccggtcaaccgattgattatttttgaagcgttggcggtgaacgccggttcgctgctgacgcctgtcggtaatccgcaaaatattctgttgtggggacgctccggcttaacctttgctgaatttagcgggcaaatggcgccgcttgccgtcatgatgatgctgacgttactgctcctgtgctggttttgttttccgggtagggcgttacagtatcataccggtacgcgttcgccgcagtggcagccccgtctggtgtggagttgcctggcattatatgtcgtttttcttaccgcgctggagctcaggcaagagttatggggactggtgttggtggcggctgggtttattgtgctggcgcgcagggtgatagtcagcgtggactggacgctgctgctggtatttatggcgatgtttattgatgtccatctgctaacgcaattgccggcgttgcagggcgttttcaaccaggttggcgcactgtctcacctggggctttggctaaccgctatcggcctgtcgcagattatcagtaatgtgcccagtaccattctcctgctgaactatgtaccggcctcgacgctgctggcgtgggcggtgaatatcggcgggtttggtctgctgccggggtcgctggcaaatcttattgctttacggatggcgaacgatcgccgaatctggtggcgatttcatttctattcgctgccgatgctggcatgggcggcgctggtgggatatggattattgcaactgatgccgtaagagaagcccgatagtatctatcgggcttcgcaggcagagtctgtcagttcagacgaaccggcatcccggaacgatcctgaactgcctgttgtacgacggtctgatcaacgtcaggctcgttggtgacggccaggatactcttattaagcgtgatcggcaccgcttccttaccttcaaactgcgcttccgtcgttgacagcgggttatgcacctcaatgtaacggctaccgtccggctcggtggtggcttttaccggttcatcgataaactgcacgcgggtaccgaccggcacattttcaaacaggaatttgatatcgtcgttgcgcagacgtacgcagccgtggctcacgcgaagcccgatgccgaagttggcgttggtgccgtgaatagcatacaggcgaccgatgtacagcgcgtacaggcccatcgggttatccgggcccgcaggcacgacggcaggcagcggctcgccggcggcgcgatattcagcgtgcatttttgccgtaggcgtccaggtcggaccggcttttttacgttcaactttggtcgtccagttgataggcgtgtctttacctaactgaccgatcccaatcggcaggacgataacggtgtttgtgcctttcgggtagtaatagaggcgcatttccgcgctattgatgataatgccttcgtgtacggtatccggcaggatcagctgctgcggaatattcagcacggtaccgcccttcggcaggaaggtatccacgccagggttggcttccagcatgttggagagccccatctggtactccgcggcaaaatactccagcggctgggtattgccctccggaacggtgatgacctgattttgcccaattaaacggctaccatcggtaggcagcgggtaagtgactgctgaggctgttttacaaaaaccaactacagcgaaagccgccgcgaaaagcgttgttaatttcatattcatgttatgcgagattctgtgccaagcaggctagtaggttgagaattctgtcatgttgggagcgcattataggtgcattccagtaaacagggaattcagatgtgtacgaaatcacgtttttttcccttacggttcagtgtagccctttgtacagggcgcgatcttatttcagacttgtggcataataagcggtttgtcacatcttttttcaggataagcctgtgttagtttccagcaacgttaccatgcagttcggcagtaagccgctgttcgaaaacatttccgtcaaatttggcggcggcaaccgttacggcctgatcggcgccaacggtagcggaaagtccacttttatgaaaatcctcggcggcgacctggagccgacgctgggcaatgtttccctcgatccgaatgagcgcatcggtaagctgcgtcaggaccagttcgcttttgaaacattcaccgtacttgatactgtcattatggggcatggcgaactgtgggaagtcaagcaggagcgcgaccgtatctacgccttgccggaaatgagcgaagaagacggctataaagtcgccgatctggaagtaaaatacggcgagatggacggttattccgctgaggcgcgcgcgggcgaactgctgttgggggtgggcatcccgctggagcagcattacggtctgatgagtgaagtcgcgccaggctggaaattacgtgtgctgctggcgcaggcgttattctctaatccggacatcctgttgctcgacgaaccgaccaacaacctggatattgatactatccgttggctggagcaggtgctgaacgagcgcgacagcacgatgatcatcatttcgcacgaccgtcacttcctgaacatggtttgtacgcatatggcggatctggattatggcgacttgcgcgtctatccgggtaactatgatgagtatatgacggcggcgacccaggcgcgtgaacgtctgttggccgataatgcgaagaaaaaagcgcaaattgccgagctgcaatcttttgttagccgttttagcgccaatgcctctaaatcgcgtcaggcaacgtcgcgcgcgcggcagattgataaaatcaagctggaagaggtgaaagcctccagccgtcagaacccgttcatccgttttgagcaggataaaaaactgttccgtaacgctctggaagtggaggcgctgacgaaaggttttgataacggtccgctgtttaaaaatgtcaatttgctgctcgaagtcggcgagaagctggcggtactcggcaccaatggcgtgggtaaatctacgctgctgaagacgctggttggcgatctggacgccgatcacggcaccgttaaatggtcggaaaacgcgcgtattggttactacgcgcaggaccacgaatatgaattcgaaaatgacctgacggtgtttgaatggatgagtcagtggaaacaggaaggcgacgacgagcaggcagtgcgcagtattctgggccgcctgctatttagccaggatgatatcaaaaagcctgccaaagtcctctccggtggcgagaagggccgtatgctgttcggcaaactgatgatgcaaaagccgaatatcctgatcatggacgaaccgactaaccacctggatatggagtcgatcgaatcgctgaatatggcgctggaactgtatcagggcacgctgatctttgtttcgcacgaccgtgagttcgtcagctcgctggcaacccgcgtcattgaaattacgccggagcgcgtggtggacttcagcggcaactacgacgattatttgcgtagtaaagggatcgagtaagttattgtctgtaaccccgatagcgtcggggttacagaatgttaacaaggtaatttttattttttccgaatgcaatgtgaaaattatatatactcttagagcctatcccattagggctattttacttgccattttggacctgggcagtgctcgccaaaacgcgttagcgttttgaacgccgctagcggcggcccgaagggcgagcgtagcgagtcaaacctcacgtactacgtgtacgctccggtttttgcgcgctgtccgtgtccaaactggctgcgccaataacgcctggtgggataggctcttaatattctattttaaaattaaatgaaagaagaggatctatcataaaaattgcgaatatattttgtggtaaacatattgtaatgttattttctttataagaattcaagtgctattttatattcctttattgttcaacaaaaggaataaatatgagcattttggaacgcttttttggccgtaaagaaaaaaactcatctaatatacaaggtgttttagtagcgaatgctgaagttgataacccactaagtttagttgttgtatttgatactctcccggaaaataattcaaaagaactcacccgcttgttgcgtaattatcattccagtatgaaacaggcaacgtgtgaacttgtccctgaactggatttttttggtttagcaggatggggtaagcatgtaatatcgatggttggatttaaaacgccttaccctcaggaatcaatcgaacaatgcgtcgcgccagctcattatccccaggaagtaaaagagcaagtacgggcaaccagtgcaaatattattttatattataaggggtatgatacttcacctttagagcaatatgttgcgttggctgtggttgcaggtgcattaagtaacatgggggctgtcgctgtattaaatgaatcggctcacacttcattacctgcgggggtatttaagtctcaggagttgggtaagcatagtctggaaatgttgcgtgaaggtttcccgctgacctctctattttgtggatttgtgaaatatgaagttgaggatatcgaaggcgtatggatgcgtacctatggtgctgattgctttgggctaccagatttcgcagcacacgcacaaggtcatcacgaagggcaaaaatattctgatattttcaataatgttctgcgttacctgcttgaaagtggagcagaaatggctgccgggcataccatgcaagtcggtaaaacgacatttatgaaactgcgcgatccccttgacgatgaatattacttacaggggcctggaaccacattagtggttgaactgattgaagaagatgagtgtaatgctcattgagaaatcggggtaattgccccgactctcgttaaagtgtaaacggcactttattttccagcaccgcctgaatcacattcagtgcgccttcatgcttattattatcggtagcgtaacgggcgatttgtttaatgttttctgcggcattgtccatcgcaaaggaataatgcgccatttttagcatctctgcgtcattgccgctgtcgccaatcgctaccatattttgtggcggcagatcccagcgtttcagtaaccgcgaaataccgtttgctttatgcaggccgggaataatcagatcgataaaaccgaagccgctggtgacgggcttcataatgccatcgagcgtaacgtgtagtttgtcgatcactaacgggatttgttcatccggtaggttgagcgaaaacttgaacagtacgtcatcaatctcctgataatcttttacgggtttcaggcgatggtagtgttttgccatcagggtaacgaatgcttctggcgcattttcgctgacatatgcactttgcagaccgcaggcgacaaaattaagttgcttatctttcagcaactcgccaataataatccgcgattcatgtcgggtcagttcgccgtggaacagttgcttgccatgttcgtaaaccagtgcgccgttttccgcgacaaaagagatcgcatcctttagctcaggaaagaacgaaataagctggtaatactgattaccgctggcgacaacgaactcaatgccgcgctttttcagttcctgaaattacgccggagcgcgtggtggacttcagcggcaactacgacgattatttgcgtagtaaagggattgaaagctaaacactgacgcccggtggcgttgtgtttaccgggcctacgtatcctggcgcgtaggtccggtaagacgggtgcgcccagacaaagggcgcaccgcagttaagcgggcagggcggtacgaccgtcaaacatctatacctaatgcccgtttaccgtgaatattcagatcgcgcagcgtgaagcgcccttcccaggtggtttcatagtcctcgcgcgggaaatcgcccggtgatgcgcctgtctccagcgccgctttcaccttacgcgcataggccagatttttctcacacattggcgcggcaggaatgtacatcacattgccccagccctgctgattttcgacgggggcgacggagtggatgacatcgcaatgccaccacacggaatccccggcttccagcggcggaatgctggttaacgccgccatcagtaaaggatgccactgttcagaaatcggcagcacccggcccggcgcgacgccgcataattcatcttccgggacatcatccagcagcgggcgcagcagaatatacgccatcgcctccgggatagggacgacatgaagcaacccctgaccgggcagcatatcggagagcgcggtccagccctggaaggtgcgaaataccgagcattttgtggtgttatccaccgtgtactcttcaacgtcggtacggtgcgccgcattccacggatcgtactgctcgacgttgccgttaaacacgctggcgaatacctgctgataggctggcagcagccagcgttccagcgcgccggagtcggtatgcgcccccagtcctttggatgtggtgcccggcgggcggcggcggatgcgatccgggtaaataatgctgatatccggattaaaccatcgcttgccgtcgtgctctacctgccatagacggttgaggaacgactgcgccagcgccatctcttcactttggcgggcctgcatttgcgcctgcgaccagtagacaggatagatttcaggccgggaggcgctcagcgtaccgaaaaaattatcccccggtcctttatacacctcgtcaaaatggttcttgtccagataatcgagcatcgactggtcccatgccagcgcctgttcgcgtggaaaatgacctttaatcaccgcgcacccgcggcgcttaacctcggcgcgggtggcatcgctaatgttgcccatcgccagttcgctaaaagggataattggccataccggctgcccctgcgccttcagatcgttaatttccgccacccgggctgctatggtggcgctcaaacggtcgaacaccgcctgtacgtcgccgatttgcgcgcgtagcgcctgcttcatctgacgaatggccgcttttgggtcggcgggcagcgtttcgtgggtaaaaggagtcgtcatatcaacctcatcatctttcgttcgaaagtaaaattagttacatctgatactttaagttaaaataaggttaatgcaagtttaaaatattgcaggagcgcacaaggagagaagcgagaggaaaacgtaaggtggccaggacgccttaatgtcttatgcggctattcctttcgttcagccacttttcattcgaaataaatttgtggttctgctcacattgttattaaaatgtttctggtcgcagttacagccaggagcttaagtatgaccgttaacgttgtcgttacagatatggacggcacttttctcgacgatgccaagcagtacgatcgtgtacgcttcatggcgcaataccaggaactgaaaaaacgtaatatcgaatttgtggtcgccagcggtaatcagtactatcagttgatctccttcttccccgagctgaaagacgaaatttcctttgtcgcagaaaatggcgcgctggtgtatgaacatggcaagcagttgtttcacggggagctaacccggcatgaatcgcggattgtgattggcgaactgctgaaggataagcagcttaacttcgtcgcctgcggtctgaaaagcgcttatgtcagcaaaaacgctcccgagactttcgtggcgctgatggccaaacattatcaccgcctgcagccggtaaacgattatcacgacattgacgatatcctgtttaagttctccctgaatttgcccgatgaacaaattccgctggttatcgacaaactgcacgtatctctggatggcatcatgaagcccgtcaccagcggcttcggttttatcgacctgattatcccgggactgcataaagcgaatggcatcagtcgtctgttaaagcgctggaacaggtcgccacagaatgtcgtcgccattggcgacagcggtaatgatgcggaaatgttgaaaatggcgcattactcttttgccatgggcaatgccgcagacaatatcaaagcgctttcacgttatcacactgatgataataaccatcaaggcgcgctcaacgtcattcaggccgtgcttgacggcaccgatcccttctgattaacaggcctgcgtaggcctgttaaacgtagcgccatcaggcagttcggacatattgccgatggcgccagggtaaattacagcatatgttcggtacgggcgatgatatcgtcctgcgcatccggcgacagcgcggtgaagaaggcggagtagcctgccacacgcacgaccagatcgcggtactggtctggatgttttttcgcatccaacagcgtttcgcgtgacacgatgttgtactgaatatgccagcctttatgcacctcaaagaacgtccgtagcagaaccatcagtttctgtttgtcggattcgttttccagcgtcgttgggttcagtttctggttgagcagcacgccgccgagaatggaaccggtaggtaatttgcctacggaaccaatcaccgccgtcgggccgagatgatccgtacctgatgcagggcttgcgccttccgccagcggtgtatgcgctttgcgaccatccggggtagccatagtcgcggcgccaaatggcacgtttgctgagatagaggacgtaccggcgtaatagttgccgccgacagggccacgaccgtagcgcgggttatgatattgcttcagctcatcaatataggtctgataagcgcgcgccagcagcgtatcgacggtatcatcgtcgttaccgtacttcggcgcgccgttaatcagacgctggcgcagctgctcatgggtcagcccgtcaaagtcatcggccagcgcggcggcaagctgctgttgaccgataacgccctgttcgaagaccagttttttcacagcggcgaggctgttgcccaggttggcgataccgacctggagaccggatacccagtcatatttcgcgccgccttgcttgatacttttcgctcgctcaatacagtcatctaccagcgctgagcagaggatatcgtggacgttctcttccaacatggtgtcgaccacatactcaatttcaatcgatttgcgcgtgtagtagcgaatttgggtatcccaggcggccatcacttcgtcaaaattgttaaagttgcctgcggagagcgccttttcctgcggcagaaataccttgccgctggtggcgtcgcgaccgccttccagcgccgccagcatgacgcgggcgaagttaataaagctcatgccggtgcagcgataaccccatttcccgccgacggcggtttcgatacagccgatcgccgcataatcgtaagcgtcctgcggttcgatccccaacttgataaattccgggatgacgatttcatcattgttaaacgccggcatcccaaagccgcagcggatgacctggacgcaggcgtcaaggaaatcgttactcattccggcgtgataacgcacactgaggttgggctgggtagaacgcagacgtccacaggactccagaatggcgtaagacagcggattcactgcatccattggctgaccgttgataagtttctgaccgccaatggtgacgttttgatacagcgggctgcccgcggaggctttagagtgcgaaccggagcggatcttgtttacttccagcagtttcagccagcagctgtgcagcagttcaatggcgtgctcacgatccagcgtctggtttagttcgacatcgcgacgataataggggtaaagatactggtccatacgaccaaatgacaccgagtgaccgttagactcaatttgtagaatcagttggatgaagtagcacaattgcagtgcttgccagaaggtctgcggcggttggtgggcgatcacctcgcagttttcggcgatggtaagtagctctttacgacggctttcacgggactcttcgcccgccatctggcgcgccagcgcggcaaagcgcgtgatatgctggcttaccgcgtccagcacaatatcaatcgccttcaggaactgctcgccatgcagatcttccagcacggtcaggttgatgcgtgagcggcgctcggcgactttatcgcgcaggccataaagccctttttccagcagcagcgggaagttcaccgccaggtgcgcatcgccggaagtcatattgccttcggctttgataatgccagtcgccagaagccctttttgttcatcggtaaacatgccgtagcagcgatcctggacggtttgaccgcgccaccacggacagacgtcgtgcagaatacgtttgttttcttcacttacggaaaaacctgcgccgggccggtccgccaggtcgtcgatctctttttcaatccacgagacggtatattccgggaaaatcggcgcggcgcggacttcacttgcctggttgccgacgatcagttcatcgtgttttatccagatagtgcgttccgccaggtgatgggccagcgccagcgcacggcgtaccggaatcggtttatccagatgctgctggtacatttcggtataatgctgcgcgcgctcggtacagaccggcggtttcacgatatgtaccagcgcggttttgtgcgccttaatgcggtcactgagcgtgtccagtttcagttgggtcatgataattatcctcgtagggtcgcggttaaacctttttggcaggcgtacttctgggcaaaatcaagtaacgccggcgcatccagtggtttatccggggcatgatagggttgactgagtaagtggtatttattgatgcccagcgtgtggtagggcagaaaatgaatttccccgacgtgcagttcgtcggcggcaaagtcggtaatggctttaatggcctcctcatcggcattaaatccctgaatcagcgggacgcgaatcaccatttttttgcccgcggcggcgagtttcctgagattttccagcacccgcgaggcgctgccatcggtccactgcttaaacggcccgtcggcgacatgcttcaaatcagccagaaacagatcgatataaggcagtgagggcgcaatgtatttccatgggacatgcagacaggtctcaaccgcagtatgaataccggcgtcatggctggctttaaacagctctgccgccagttccggctgcataaacggttcgccgccggaaagcgtaagaccgccgccgctgcgatcgtaaaaaggtttatcgcgcagtaccgtcgccatgatctcatccacgctttttatttcgccgcacacggttaacgcctgtgtggggcagcaatgcgccaggatggaaaaatgggcgtcggtcagtttctcgcgatggatgagcaggccgtttagcgcgcgctcaatgacgtccggcgcggcttgcgcgcacaggtcgcatccttcgagacacagccgcgcgtcgtataacagatcctgagcgcgggcgcggctttccgggttctggcaccagcgacagcccaacgaacagcctttgagaaatactacggtacggataccggggccatcgtgggtagaatagcgctgaatattgaagatcataaacggcctctcttatttcatataaagattaaattactttcgaatgaaagctatcttgatgtgcgtcaacgaatggagaggttctgacaaagaggcgttaaatgaggtacaacatcacggtttgaggttgtggtatggcgtttaagatgatgccgcgctgcttgagccgatcgtcagtcggagcttgggtaagctggctttgcgtctgatgacagtaattatctgttgatacagcacggccataaaccgtgctttggtatgtttatccgtaaagtggctactgcccgcagacctcacagccggggttgcgcattaacttcatttcgcggaactgacaggtcatcgcatcgtacatgacgatttttccgctggcaggctgaccgtaatgcgccagtagcttaatggcctccattgcctgtagcgaaccgatcacgccaatcagcggcgccatcacccctgcctctacgcaggtcagagcgttttcgccaaacagacggctcaggcagcggtaacagggttcgttttcccgatacgtaaagacggtaacttgtccttccatacgaatggccgcgccggagattagcggcactttcgcggtatagcacccggcgttaagttgattacgtacgctaacgttatcggtacagtccagcaccagcgaatgcccggcaatcaggctggtcatagcgtcgtcgtccagccgcgcgttaacgggcgtaatggtaatatgtgggttgatacgcgccagcgcgtcgcgggcggactctaccttcggctgcccgaccgtggcgtcgctgtgcaaggtttgacgctggagattggaaacggaaacggtatcaaaatcgagtagcgtcagttgcccgacgccagcgccagccagatactgcgttgccgcgcagccgagcccgcccagcccgaccactaatacccgcgcatcttttaacgcttcctgcccttcaaaatcgaagccgcgcagaataatttgtcggttatagcgcagcatctcctggtcgctaagttccgccattacaggcctccgaacagagcattaaacggctcgacttccacccattctcccggctcaacattgccgcgttcacgctccagcacaataaagcagttgcccagactaaacgagctgaaaatatgtgaaccctggtgtccggtggtcgtgacctccagttcgccgttggcgctacgttgcagaatgccgcgctggaaatcgagacgccccggcgttttcttcaggcgagatgctgtgcgtacacgctggcgcggcggcactgcgcttgccgtgttgccgccaagcttcgccagtaagggctgaaccagttgataaaacgtgagcgccgcagagactggattccccggcaggccacagaaccagctattactgagcttgccgaaggcaaacggtttgcctggcttgatagccagcttccagaaggcgatttcgcccagctcctcaaggatggttttggtatagtccgcttcaccaaccgagacgccgccggagcttatcactacatcggcctggctgtcggcgtcgataaacgcggcgcgaagcttaccgggatcgtcaggaataatgcctaaattgatcacttcgcagccaagctgttgcagcatcaaatgtatagttagacggttagtgtcataaatttgtcccgcctccagcggctggcccggaagctggagctcgtcgccggtcgagaacagcgctacgcgcactttacgtacaacctgcgcatcggcaattcccagcgacgccagcactggcagttcggcagtagtcaggcgcgtaccggccggaaagaccaccgcatcctggcgaatatcctcgccgcggcggcggatgttttgtccgcaacgaacatcggcggtaaaacgcacgccgtcatcggtttgttccgtctgctcttgcatgactaccgcctcgcaacctgccggtaccggggcgccggtcataatgcgaatgcaggttcccgcaggccactctccctggtagggctgaccggcaaatgctttgccggcgacgggcagcggcttatcggcggacaaatccgccacacgtaccgcataaccatccatagctgaattatcaaagccggggacatcaaggggagatacgatatcggtcgccaggatgcggccaaagcagttcaccagcggcaacgtttctacggcggtgagaggggtaatacgtgaaagcatctgggtcagcgccgtttcaagcggcatcaatccggcggaaaattccatgaacatactcctgcgaggcaaaatcgaatccggctattatgtcagaaaacagtggcgggcagtatgctacctcggtcttagagacggccttgcgcctttacataccttacgcatctttctatattcaaaaatcgaatgaataactcacaacaattctgatagttatagtaaaagttgtgtgccaccgtaatggaccctaaaaatgaataaagcagtgattgcgattcacggcggcgcaggcgcgattgctcgcgcgcaaatgagccatgagcaggagctacgctatatccaggcgttgtcagagattgttgaaagcgggcaaaagatgctggaagcgggtgacagcgcgcttgatgtagtgacggaagcggtgcgcctgctggaagcgtgtccgctcttcaatgcgggtatcggcgcggtctatacccgagacgggactcatgaactggatgcctgcgtgatggacggcaataccctgaaagccggagccgtcgcgggcgtgagtcatgttcgccatcctgtgctcgctgccaggctggtgatggagcgcagcccgcatgtactcatggtgggggaaggggcggaaaactttgccttttcacaggggatggcgcgcgtttcgccggatatcttttccaccccggcgcgttacgagcaattgctggcggcgcgtgcggcgggtgaaatggcgctcgatcacagcggcgcgccgctggacgaaacgaaaaaaatgggtacagtcggcgcggtggcgcgggataaattcggcaatctggcggcggcaacgtctaccggcgggatgaccaataaattgcccgggcgcgtcggcgacagcccgctggtcggcgccgggtgttatgccaacaacgccagcgtcgccgtttcctgtaccggaacgggagaggtctttattcgcacgctcgcggcttacgatatcgccgcattgatggaatatggcggactcagccttgccgacgcctgtgagcgcgtggtgatggaaaaattaccggcgctgggcggcagcggtggattaatcgccgttgatcacgaaggtaatgtcgcgttgccgtttaacagcgaagggatgtatcgcgcctggggatatgccggggatacgccgaccacaggaatttaccgggaataaggagccgcaggtgccgcacagcgatgaactggatagccgcgatgttctgtccgtcagtggcctgaatatcgcgtttcaccacgaagggcaacaggtagacgccgtgcgtaatgtgtcattacgcctgaagcgtggagagactctggcgattgtcggcgagtcgggatcgggaaaatcggtgacggcgctggcgttaatgcggctgattgagcagtcgggcgcgaacgtgcgctgcggcgaaatgctgttgcgtcggcgtaatcgtcaggtgattgagctgtctgagcagagtgacgcgcagatgcggcgtgtgcgcggcgcggatatcgccatgattttccaggagccaatgacctcgctcaacccggtatttaccgttggcgagcaaattgccgaatctattcgtttgcatcagggggccagccacgaagaggcgctggcggaagcgaaacgtatgctcgatcaggtacggatcccggagtcgcaggcgattttatcgcgttatccgcatcagctttccggcgggatgcgccagcgagtcatgatcgcgatggcgctatcctgccgtccggcggtattgattgccgatgaacccaccacggcgctggatgtcactatccaggcgcaaattctgcaacttatcaaagtgttgcagcaagagatgtcgatgggcgtgatttttatcacccacgacatgggcgtcgtggcggatatcgccgatcgcgtgctggtgatgtatcagggcgaggccgtggaaaccggcagcgtagagcagattttccatgcgccgacgcatccttatacccaaacgttactggccgccgtccctcagcttggcgcgatgcgaggccactcgctgccacgccgtttcccgttgatttccgctgacgaaccggccctttatgaatcgcagattgagcaagacacggtggtggaaggcgaacctattctccaggttcgggggctggtgacgcgattcccgctgcgtagcggtctctttaaccgcgttacgcgtgaagttcatgccgttgagaatatcagtttcgatctctggcccggcgaaacgttatcgctggtgggcgagtccggtagcggaaaatcgacgaccggacgcgcgctgctgcggttggttgaatcccggcagggggagattatctttaacggccagcgcattgacacgctgtctgcgggtaaactccagccgttgcgccgcgatattcagtgtattttccaggacccttacgcctcgctcgacccgcgccagaccgtggggtattccattatggaacctttacggattcatggcctggggcagggggacgctgcggcaaagcgcgtggcctggttgcttgagcgtgtcggattacgtcctgaacatgcctggcgttatccgcacgagttttccggcggtcaacgtcagcgcatctgcatagctcgcgcgctggcattgaatcctaaagtgattattgccgatgaggcggtctccgcgctggatgtttccgttcgcgggcagatcattaatttactgctcgatttacaacgggaaatggggatcgcctacctgtttatttcgcatgatatggcggtcgtggagcgaattagccatcgcgtggcggtgatgtatcttggtcaaattgttgagatggggccgcggcgcgccgtttttgaaaatccgcagcatccttatacgcgtaaattgatggcggcggtgccggttgccgatccctccagacaccggccgcggcgcgttctgctatcagatgatatacccagcaatattcataaacgtggcgaagagacgcccgccgtttcattacagttggtcgggccgggacattatgttgcgcggccgctgcaggataatgcgctctcgcgcttataacattcagacaggcagggtttcaggagaacaacatgacgcaatttattacgcataaatggctggcggcgctgggactggcctcatccattgcggcttttccggccctggcggccaaagatgtggtggtggcggtagggtctaatttcaccacgctcgatccgtatgacgccaacgatacactctcgcaggcggtggcgaagtcattttatcaggggctgtttggcctggataaagacatgaaggtaaaaaacgtcctggcggaaggctataccgtttctgatgacggtctgacctacaccattaccctacggcagggggtgaaatttcaggacggcgcggattttaatgcggcggcggtaaaagcgaatctcgatcgcgccagcaatccggataaccacctcaagcgttataacctgtataaaaatatcgcaaaaacggaggttgtcgatccggcaacggtaaaaattaccctgaaacagccgttctccgctttcattaatattctggcgcacccggcgacggcgatgatctcgccgcaagcgctggaaaaatatggcaaggatattggttttcatccggtcggtaccggtccataccagcttgaaacctggaatcagaccgactttgtcaaagtgaaaaagttcgccggttactggcagcagggcttacccaagctggattctattacctggcgtccggttactgacaacaatacccgcgcggcgatgctgcaaaccggcgaagcgcaatttgcttttcctatcccttatgagcaggccgcgttactggcgaaaaataaaaacctcgaactggtcgccagcccgtccattatgcagcgttatatcagtatgaatgtgacgcagaagccgtttgataatcctaaggtgcgtgaggcgttgaattacgctatcaatcgtcaggcgctggttaaagtggcgtttgccggatacgccacgccggcgacgggcgtggtgccgccgtcgatagcctatgcgcaaagctatcagccgtggccctatgatccggctaaagcgcgcgaactgttgaaagaggcggggtatccagacggtttcagtaccacgctgtggtcatcgcacaaccatagcaccgcgcaaaaagtgttgcagtttacccaacagcaactggcgcagattggcgttaaagcccggataaccgcgatggacgccggccagcgcgccgcggaagtcgagggcaaagggcaaaaagagagcggcgtgcgaatgttctatacaggctggtcggcgtcgacgggcgaagctgactgggcgttatcgccgctcttcgcatcacaaaactggccgccgacgcagtttaataccgctttttacagcaacaagcaggtcgacagcgatttggcggcggccttaaagaccaacgatccgcaggagaaaacacgattgtacaaagaggcgcaggatattatctggaaagagtcgccctggataccgttggtggtggagaaattggtttctgcgcacagtaaaaatttgaccggtttctggattatgccggataccggtttcagctttgacgatgcggatttgaagtaagtaatgcgatggggctggatggcgcgcgcgttgtccgccatccggtaaaaggttcgtgtgatgcttaactatgttctcaagcgcctgctgggattaattcctacgctgttgattgtggcagtgctggtgtttttatttgttcatttgttgcccggcgacccggcgcggctgatagccggaccggaagccgacgcgcaggtgatcgcgctggttcgtcagcagctggggcttgatcagccgcttcatgtccagttttggcattacatcacccatgttttacaaggcgatttcgggacgtcaatggtttcccgccgcccggtttctgaggagatcgccagccgctttttgccgacgctgtggctgacgataaccagtatgatatgggcggtgctgtttggcatggcgatcggcatcgccgccgccgtgtggcgtaatcgctggcctgaccggttaggaatgacgcttgccgtgaccggcatttcttttccggcttttgcgctgggaatgttgttaatgcagattttttccgtggatctgggctggctaccgaccgtgggggcggatagctggcaacattatattttaccctccctgacgcttggcgcggcggtggcatccgtcatggcgcgttttacgcgctcctcgtttgtcgatgtcctgagcgaggattacatgaggaccgcgcgggcgaaaggcgtcagtgaaacgtgggtggtgttaaaacatggcctgcgcaatgcaatgatcccggtcgtcaccatgatgggactgcaatttggctttttgcttggcggctcgatcgtcgttgaaaaagtgtttaactggccggggcttgggcgattactggtcgactccgtcgacatgcgcgactaccccgtgattcaggcagaagtgctgctgttttctctggaatttattcttatcaacttagtggtggatgttctctatgccgccattaatccggctatcaggtataagtaaggatgcgattatttaactggcgccgtcaggcgattttacatgctatgccggtggtaaaacccgaccagatacgcacgccgtggcgggagttctggcgtcgttttcgccgccagcatgtcgcgttggtcgccgggggattcgtactggcgttaattctggtggcgatttttgcccgttggctgacgccctacgatgcggaaaactattttgactacgatagcctgaacaatggcccctctttgcagcactggtttggcgttgactcgctgggaagagacatctttagccgggttctcgttggggcgcagatctcactggcggcgggcgtgttcgcggtatttatcggcgcgataatcggtacggtgttgggattgctggcgggatattatgaaggctggtgggatcgttttattatgcgcatttgcgatgtgctgttcgccttccccggcattttgctggcgattgccgttgtggcggtgttaggcagcggtattgctaatgtgatcgttgcggtggcgattttctctattccggcgtttgctcgtctggtgcgcggaaataccctggtcttaaaacagcagacgtttattgagtctgcccgcagtatcggcgccagcgacacgacgattttgtttagccatatattgccgggaacggtctcgtcaattgtggttttctttacgatgcgtatcggtacgtcaattatttccgcggcaagcctgtcatttctcggattaggcgcgcagccgccaacgccggagtggggagcgatgctcaatgaagcgcgggcggatatggtcatcgcgccgcacgtagcgctcttcccggcggtggcgattttcctgactgtgctggcgtttaacctgttaggcgacgggttgcgcgatgcgctggacccgaagattaaggggtaagccagcccggtggcgttgacgcctggcgggcctggaacgggctcgtcaggcgggataacacatccggcacccgcgccgggggaggtggcgttaaacccgactgccccacaaatcatattcgtcggcgttttccactttcacgcgcacgatatcgcccggcttgacgttggtttcgccgttcaaatagaccgcgccgtcaatttccggcgcatccgccatgctacgcccgatagcgccttcttcgtcaacctcatcaacgatcaccagaatttcgcggcccactttttcctgcaagcgctcagcggagatttgctgttgcagttgcataaagcggttccagcgctcttctttcacctcttccggcacctgatccggcagctcattcgcgcctgcgccttccaccgggctgtacttgaagcagcctacacgatcgaggcgcgcctctttcaggaagtcgagcagcatctggaagtcttcttccgtttcgccggggaagccgacaataaaggtggagcgtagggtcagttccgggcagatttcgcgccactgcttaatgcgcgccagctggcggtcaacggaaccgggacgtttcatcagtttaagaatccgcgggctggcatgttgcagcggaatgtccagataaggcaggattttgccttccgccattagcggaatcacatcatcaacgtgtgggtaggggtagacgtagtgcagacgtgtccagacgcccagttttgataactgttcgcacaggctcaccatactggttttcaccggttcgccattatggaatccggtgcggtgcttcacatctacgccgtaggcggaggtatcttgcgaaatcaccagaatctctttgaccccggcatcaaccagacgtttcgcttcgcttaatacgtcgccaatcgggcggctgaccagatccccgcgcatcgacgggatgatgcagaacgtgcagcggtgattacagccttcagaaattttcagatacgcataatggcgcggcgtcagttttacaccctgttccggtacgaggcttaaaaatggattgtgcttcggcttcggtacgtaatgatgtacgtgctgcagaacttgctcatagctatgcggcccggtgatttccagtactttcggatgcacttcgcggatctgatcttcttttgcgcccaggcagccggtgacgattaccttaccgttttcgttcagcgcttcgccaatggcttccagtgactcttgtaccgcgctgtcaataaagccacaggtattaacgataaccatatccgcatcgtcatagcgtggcacaacgtcatagccttcggtacgcagctcagtcaggatgcgttccgaatcaacgaggtttttcggacagcccagggaaacgaagccgatctttggctggtgggttacattactcatagcttaaaaagtgttcatttattggaatggtcagggcagggattctacagatatccgaacaaaaattgtatcgcaatctcatcaggagcggcggcatcaaccgttgtggttatcagcaaaaggtgaaaaagggcaattctaagaaaattcttgatctctgacacccctttgtctaaaaaacgaccatactattaagttgaaccctggtagaaaagaggaggaaaaaaggtatggtcgttgacagactgagaaccgatcttctcaacaagctgataaacgcgcgtatcgatcttgccgcttatctgcaattgcgaaaagcgaaggggtatatgtcagtcagcgaaagtgacactctgcgtgacaatttttttgaactgaatcgcgagctccacgatcacgctttacggcagggactgcatctcgatcaggaagagtggaacgcgctgcgccgtgccgaaggcgcgcttgcagccgccgccgtttgtttaatgagcggacaccatgattgtccgacctttattgccgtcaacgcagataaacttgaaaactgtctgacaactttgacgctgagtattcagagtctgaaagcacattcaccgcttacacaggtctgaacaaggggaggcgactcctgaggaatccccagcaaaccaagacaggcatagtgttatgtgatctaattgattgcgctaacactttcaaggaaatcatcactatgcctgctcgttcattatgccaaaaatcctttaaaaatatactggagcctttgcacctttaccgccgtcaatctctgattgaggctaccagtgtagtgattaacggtgcatctcttacacttattcagtattgggcgtgatttgtcaggagtagcatcggtcaggcacaagataaaacgtatcgatcgacttcggggaaagtctcacttgcagaatgaagtttcagatactttttcagcgtgttactaaaaaatcacggagggaatgacccgggttgtcatgctctcctatatgccagcctgttttccgccaaaggtgactaaattcggttcaccagacaatcgttgatgttcttagggaacggtatagtcgaattcactcctgaaacaggtacggaatgtcggccgtttactattctgaaacgttatttatatcaaataattaaattttatttttatctttgttattgtaacaataaattacatgtttctttctgttatcagcgaacctgaaccaattttaatggggggttagataaaagctaattcagaaaattatttttttaagatatattgaattatcagatgctccattcaaatgagagacgagaatgcaaacgttagaacggttttttcttttcgttacgggggaccaacctgaacgatttgaaaaagcaaatagcagttgtgctgatagcgtaatccttgatttagaaaatgcggtgtcatctgagaaaaaaataattgccagagaaaatgctctgaatttcatgagtaatgatgaaaaagtactgattgctgtacgtgcaaaaattgtaataacttcacgcctggctggatcatatccttctgttgacggtatcacaactgaatttatgaaaaacgagttgacaatacaaaatgctattcactcctgtaaaatggggttcagtggcaaggtatgtattcaccctccacaaatttcacatgtaaacagagcattcagctatttaaaacaagaaatcgagtgggttccccagattatgcgactggctcaatatccccatggagcgttcagtcatgaagggcaaatggtggataaaccgttactggaaaaagcaaaaaggattttggctcatagcatttagtaaatatatgaaggagtcaccaatgaaagctttagtttgtgtaaaacaagttgtcgatcataacgttagaattagaataaagcgagatcattctgatgttgatatttctgattcaaaactcagtatcaatccatttgatgaaattgcagttgaagaagcagtacgtttaaaagaacggggattaatcagtgaggttgttgtagtgtctataggaaacacaggtgtaggggatgtattgcgtacagcactggcagcaggggcagacagggcaatacacatattaacaaaaaactctcttacaccactaattgtggccaaaactatcaccgctattacccggaatgaaaaacccgatattatattattaggcaagcaagctattgacgatgattgtaatcaggtaggccaaatgctggcagcattactcgatcttccccaagccactaatgttagtgaaattactatttctgataattcattaactgctgttcgtgaggttgatggaggattagaaacgttaaatttatccctgcctgcagtactcactacagatctacgtctgaatacaccgaggaatatcagcttgccgaatgttattaaagccaaaaagaaacctgttaaggagatagatttcgattcacttggtattaacccgtcatccagattgactattattaaagttgatgagccagcaagaaggaaagcaggcataatcgttccagatattaacacgctgctagataaattaaaaaacgaagaaaaagtaatttaaggaggaaaatatggcttctttagttattgctgaacataacggcaatactcttttaccttcaacactcagtactatcactgcggcaaaagccattaatagtgatatagatatacttatgttaggatatggtatagaaagtattgcagttaaagccagtcatattcaggggatatccactgtatttgttgctgacagcccactattcgaacaccttctggcagagaatgtggaaaaacagatcagctattttttgaatagtgggaaaaatcattatcagtccattctttttcctgcaagctcttttggaaaaaactgtgcgccacgcttagcagcaaaacttgatgtatctcagattagtgatattacgcgtgtcattgatcaacatacctttgaacgtccaatctatgcgggtaacgctattgccacagtacacagtgatgatgaatataaagtgataactgttcgtcctacctcatttgcggctgcggttgcggaagatgagggaaaagcccccattgaatttacagaggttgttcttggttcagatcaggtaaaatttattagccaacatgttaataaaagtaaccgtccagacttacaatccgccagagttgtagtatcaggtggacgaggagtaggaagtgcacaggcattcaaagaacttgttgataacctggcagataaattaggcgctgccgtgggggcaagccgggctgctgtagatgctggttatgcaccaaatgattatcagattggccagaccggaaaaatcgttgcgcctcaactttatattgctctgggaatttctggcgccatacaacatcttgccgggatgaaagagtcaggcgtcattgtcgctattaataaggatcctgacgctcctatcttttctattgcggattatggtttggtagctgatattttcaaagctgtacctgaacttatcgataaattataaatcatattttttcctccttaaaggtaacttttatgcaatatactgatattcaaatttggcagcctggcattctgcgcaacaccgattatcttaaccccggtcccgctaagctgctggccgccactctggataaagacatcaaaatctttaaagagggggggcgttctgccagaattatggcactggctctattttcttcctgtcgaccgccagtcagatctatctgctgatggtcatccgataaaaggtcattttctaccccctgttggcgctggtttattgaggaaaaaattatgaaaagtattgaaaaggataaatatcaggatattcgtgatgcggttcgttcattatgtagtgaatttgatgataaatatcaccgtaagatagatgaagcaaaagcctatcctgaagagtttgttaataaactaaccaaagctggttggctggctgcgctcatcccggaggaatttggagggtcagggcttggtttaactgaagcatctattatcatggaagagatcaatagatcgggtggaaactctggagcctgccatggtcagatgtataacatgaatacgttgttacgtcatggatccgataaacagaaagaattctggctgccacggatagctactggtgaatggcgcctgcagtcgatgggcgtcacagaacccacagcaggtacagataccaccagaattaaaactacagctgtaaaaagagaagaccggtatgtgataaacggacaaaaagtctggatttcacgtgttcaacattcagactggatgattcttctggttcgaactactccgcttgcaaatgtaaaacgtaaatccgaagggatgtctattttcatggttgatattaaagaagctatgaaaaatggaatgacagtacgacctattcccaatatggtcaatcatgaaaccaacgagctcttttttgacaacctggaaattcccgaagaaaatcttattggtgaagagggtatgggttttcattacatacttgatggtttaaatgcagagcgtaccttgattgcggcagaatgtataggcgatggatattggtttatggatcgtgttacccgctatacctgcgagcgtgaggtttttggtcgtcccattggtcagaaccagggggtgcagtttcctattgcagaagcatttattgcagtggaagcggctaatctgatgcgttttaaagcgtgcgagctttttgatcagcatcttgattgtggagcacaggctaatatggcgaaataccttgctgcgaaagccagctgggaagcagccaatgcctgcctgcaatttcatggtggatatggttttgcctgtgagtatgatatcgaacgaaagtttagagaaacacgtttatatcaggttgctcccatatctaccaacctgatcctgagctatatcgctgagcatgtgctggagatgccacgttcattctgatgtcaaatcaattggaaaaatattatgaaacagttacctctgtccggagtcattatagtctcgattgaacatgtcattgccactcccttctgtacccgacagttggctgattatttctcgcgggtaactataatagaatgccaagaaaacagggacttttcctgcaattatgatgaacggcttaaaaatgatttgtgtatattctttttcatctgagggagaaagctaaatataaatgttatggaatgcttcatcatcatcgacatttttttaatagttgataactggctatatagtcttataggcacctttttctaaggttgaacattcctataccatttcatctgttttatcactatgatatttatttcattggttacaatatgaatgcaattttatttacataatatagctgttcctacggtgctgaaaaattaaggagttaataatgaacgatacactttctaatacccagcaatcacgtgagacaatagaatgtgatgttcttattgtgggagcaggacccgccggattatctgcagctcttaaacttaaattacaggcaaatgacgcaggaaaagaactgtccattatcgtccttgataaaggagctgagcctggttctcatattctcagtggggcagtcatggatccccgagcgctgaatgaactaattcctgattggcaggaaagaggcgcacccattaaacagcctgttactcaggataaattactgttactgacgaatgaaaaatgtattaatttgccggatgcattgattcctgataattttcgcaaccatggaaactttatcgtaagcctcggtaatctcattaaatggctcgccggtcaggcagaaacgtcaggcgtggatatttatgcaggcttttcggcaactgagatactgtatgatcaggatactaacattatcggtgtagtaactggtgatatgggacgtcatcgggatggcagcaagaaagaggggttcctgagtggaatagaaattctggcaaaatatacaatttttgccgaaggggcccgcggtagtctggctaaagaactgatcaaaaaatttcatcttgatacaggcaaagcaccccagagttttagcataggcataaaagagttgtgggaggttccatcagaccagtcccatccggggcttgtaattcacaccacaggttggcctctggataaagagtcgttcgggggtgggtttctctatcatcttaatgataataaaattgcactaggtttggttgtgggacttgattattcaaatccctggttaagcccttttcaggaaatgcagcgcctgaaaacacacccttctatacgcaaatacattgaccggggtaagcgtattggttatggcgcaagagcaatcaataacggcgggattgcgtctatgcctgatccctgtttacctggtggtctgctgattggttgtaatgccggtacgctcaatgcaagtagaatcaagggcatccatacagctatcaaaagtggcatgatagcggctgacgctatatttaatgctttgctggacaacaggaaaaacgacatactgacagaatatcaaacattactgcgacagagctggctttggcaggaactggaaaatggtagtaatttcaaaccctggtttaaaaaagggcgtgtgataggttttattatgactggcattgagcattggctgcttccccgaatgggtataaaaaaaatcccctggcgtgtaaaaaataaccgaccggacaatatcactctgcaaccggccaacaaaagccagaaaaaactgtacgacaaacctgacggtaaactgacgtttgatattttgtcatccgtctatctcagtaacacctggcatgatgacgaccagccagtacatttgaaaatcagtgatcagaatatccctatatccattaatctggatatttatggtggccccgaagaacgatattgccctgccggagtatatgaatttttacaggatagtgaaacacaaaatatgcgtctgcaaataaattcacagaactgtattcactgtaaagtttgtgacattaaagatcctaaacaaaatataacctggactacgcctgaaggtggcaacggaccaaattatacagggatgtaacgctatcactcagtctgagctgtgagcatagtaaccagtttttgtgtgaagccgggtaatttgtcaaagcttctggcgcagatttgtaattttcttaatgaccaaaattcatcaagatcaataatcgaaaattcatgcaactgacgcaaacgggatgcagcagagtgaggcattataccaatgcccacttttgcttcaaccatacggcaaaatgtttcaaagttgccgacctgtattctaattttcagtttagatggtactagttctgccttttttcggataaattcaaacattcctgtcccttcaggcaggctgatttgttcatattgaattaattcatgaaaggtcacgctttttctgtcagcaaagggatggtctgtcgcggtgataagcactagcctatcagtacggaacggcagtatttcaagattatctgttgtaatattaccagcaacaattccgagatcagttttcccctcaataacagaacgtacaatttccggacttggatactccctgagatcaatattcacatcgttatatagtgtaaggaaatggcttaacaatggggggagatactctgcaatagcagttatactggaaaatattctgacatgtcctttgatgcctttaacatgctcctgcatatcgctacgtaacatttccatctgattcacaataaggctggcgtggtgtttaaatgtttcaccagcagaggataacgttatccccttgctactacgatacagcaatctcagattgatactctgttcaagattacgtatacgcacgctaccagatgcggcagacatgtaagttttttccgctccacgtgttatgctcccttcttcactgatagcaaggaataattttaaatcttttatatcaaagtgcatcgttgtggctcataattaacgtataatacagtgtgctgcttttttatagactcagtcagactgagtatttcggcctatccgaattcctgtcacgtcgagataactacaaaatgtaggctgacggtgtcaccgccctaccatgatccggggcggatctggtaggacgctggtgaccgctgacagggggtcaggtcagacatattgtcggaaccgttgtaacgtagatgctaatacctgctccccgtggtcatcaggttaacccgtttacagcggttttttcagccccggcagatttatcataaactgatcaccgtaaatatgtggaatcagccaagtaaagaacagattggcaaacgccaccacaaacaatgatacgcctccataggtcaataaagcgcatacaagaataatcatcggcatggctttgttctggcccaccatacaggtcacagcactgacaattgagtagtaaaaaccagcaagttcaatcagcttgccaaatactgcacccagcagaaagacaggaaaataaagttttacaaaaccgatcaacttatccataaatatatcactgaaaaccggggcgaccgtcactggacgggtgaacagaactgcgccaagtgctaccagcggagcaaaaaggatcacactgtaaccacgataagcgaccagcatcagtaatgaatacattcattgtcttatctcgctagcatgactacccattttatccatgttatgcaacagcttgtgtcatatttttctgatctccattttagatcagacaggctattactcagggattccggcgcgaagaatggaacatactctaaaaagtactcggcggattcaagtcggtatcactccgttaataatctttattctcgacccgctgcatgttgattttacggttaaacgccgttctcttattcatcgcaggagtaaaccatcatgacacgcagtgaaatccccagaaaacgatcatgtattcaatcgttgattatcgtttcgaataccgacttttatcgcaggatttatgatggctaaagtcgatgtgaaatgcccgttttgcgcgcaaacggcatccgttaaaaagtatggtccggggagtgcagggcaccagcattaccgctgtcaggtatgttgccgcagctttcaggtcgactatgaataccgcgcctgtcagcccggcatgaaagagcaggttgttgatcttgccatgtacactgccggtattcgtaatccgcaggggctggccatcaatccctggagcggcgcgctatggctgcatgaacacggtccgcgcggcggcgatgaaattaacatcccggaaaaaggcaaaaattatggctggccgctggccacatggggcgtcaactatagtggtctgaaagtgccggaagccaaaggtgaaattgtcgagggaacggcgcaaccggtttactactggaaggattctccagcgatcagcgggatggctttttatgccagcgacgtttttgcgccgtggcggcacaaactgtttatcggcgcgctaaaagataaagaggtcattgtgatgcgcgtcgatggcaatacggtgacggaagaaggccgtattctgggtgacagaaagcaacgtatctacgatgtgcgtgtcggacctgacggctacttatatgtgttaaccgatgagtccgacgggcagttactcaaggtaagtcctgcagccacgcgttaggtcaccgggatcatcaccactttgcgaaaagcagggcgctcggtaagctgctgataccagcgttccagattcgggcgcggcgtccatttcagacccacgttcagcaggttatagacgaaaggcgcaatagcgatatcaccggtgccaaagttatcccctgagaaccacggctggtgggccagcgcatcatcaagaagcgcaaacaggctatcacacttttcgataccggcttcaattgccgcctggtcgcgtttttccggcggggttctgaccagtcccatcaggatcacgcggtgcgccgggcttaacgtttgattcgcccagtccatccatttttcgccctccgcacgccgcgccggattatcaacccatagccggttctggccgtattgcgccgccagatagcggacaatggcattggattcccacaataacaggtcggtttcatcatctttaagcagcggcaccagcccattaggattcatcgccagatagtcggcatcctggttaacgccgaattttccgcctgccagaatttgatcgtatggcagttccagctcttcaagcgtccacaacacttttttaacattagtcgagttgttccggccccacagcgtaatcatattaaccccttccgttttatcaggatgatgacagtaatcggcctaccgtgagataaacctaacatttacacaatggtctgtaaaaaaatcgttatgaaggaagcgtaacgggatgttattgcataaactttaaaaactttaccaagttacggtttctttaacgtcgtgagtgcgttattactcaccgcacttattacacggtggtgtgacgtgtgtttttggaatggatactcgggtggtactatgacgcaatacgcttcttcccttcgtagcctcgcggcaggttcggttctcttattccttttcgcttcgcctgtaaaggcagaggaacaaacgatcgcgccgccgggcgttgatgcgcgagcctggatcttaatggattacgccagcggtaaagtactggcggaaggcaacgccgatgagaaactcgaccctgccagtttgacaaaaattatgaccagctacgtggtgggccaggcgctgaaggcagggaaaatcaagctgaccgatatggtgacggtgggcaaagatgcctgggcgacggggaacccggcgctacgtgggtcgtcggtgatgtttctgaagccaggcgatcaggtgtcggttgcggatcttaataaaggcatcatcattcagtcaggtaacgatgcctgtatcgcgcttgccgactacgtcgccggaagccaggagtcctttatcggcctgatgaacgcctatgcgaaacgactggggttaaccaatacaaccttccagacggtacacggtcttgatgcgccagggcagttcagtaccgctcgcgatatggcgttgctcggcaaggccttgattcacgatgtgcctgacgaatacgccattcataaagaaaaagaatttacttttaataatattcgtcagccaaaccgcaaccgcctgttgtggagcaccaatctgcatgtcgacggcatgaaaacggggacaacggctggcgctgggtataaccttgtcgcctccgccacccagggcgatatgcgcctgatctctgtcgtgctgggggcgaaaacggaccgtattcgttttaatgagtcagaaaaactgctgacctggggtttccgcttctttgaaacggtcacgccgattaaacctgacgcgacattcgtgacgcagcgggtctggtttggcgataagcatgaggtcaatttgggggcgggcgatgcggggtctgtgacgattccgcgtgggcagcttaaaaacctgaaggccagctttacgttgaacgaaccacagctcacggcgccgttgaagaaagggcaggttgtcggcaccatcgatttccagcttaacggaaaatccattgagcaacgcccgttaatggtgatggaaaacgtcgaggaggggggatttttcagccggatgtgggattttgtgctgatgaaactccatcagtggtttggcagttggttctcgtaaaataactccgtagccgggtgcgcgtcgcatccggctacgggcggttaatacatcagagtaatttgttgcgctttagcgtaggccacaaaggcctcatcgggacggcggtcgctgataatcgtatcaaagcgtgataattcccccatccgcgccggacgtaccttgccgaatttactgtgatccaccaccagtacatggcactgtgccattgtcattgcccaatgttttaccggcagctcttccagattaaagcaggtagcgcctttactggtatgaacgccagcggcggaataaaacgcgatatccggacaaatattgtttaacgtttcatggaaatcaagcggtttgaaaatggcgttgctggcgtgaaactccccgccgctgaggatggcgcggcaatggggtttgtcctgcagcgccaggaaggtattaagtgaatagcacaccgccgtaaagggaaggtcattatcaatggcttcaatgatccacggcgtggtggtgccgcagtcaataaataccgtctgatgcgcttgtaccaggcccgcagccagctgagcggctcggcgtttttcttccaccagacgagatttttgatcgcttaacagataatgactggcgctgcggggctccagtacgatatagccgcctagcaacacgacaggcgcgcttttatggttcaggtcgcgacgaatggtcatttcagagacgcccaacagggtcgcggcttctttaagatgaagtttatcgctgcgttttaaggcctgcagcaattgaccaatacgctcgtcgcgtcgcgtttccatagttcccctggagagttaaataagcgctccgcaccatacagagcgcttaatattactctttttttcgctatttagtcacgtacccagccttttcgaatgggcaatgcgaaacagaaacggtaacaacgttgcagcgcctggtagagcggcgcgccgtaccactgccagatcagctgtgcgctcaggcagccaagcatcgctaccagcagcgcgccaatcatatctaacggccagtgtacgccgagatagacgcgcgaccaggcgatggtaatggctatcgccatcatcacgatgcctgaccagaggcggtgccagaacaaaaacgccagcgcaaaggtaaaaatcaccgtaccgtgatcgctggggaacgagtcatcggcggcatgatgcaggaagttatagccgatatgatcgacaaacggacggtcgtgcgggaaaaggtgtcccattgtccaggagaccgccagactgataatcagcgcgatgccgattttaacgatcagctggcgctgggcgcagacccgatcgcggggcccccacagccagagtaccacggctaagagcgggacgatgttgatgacatctttggcgataaagatagcgagcgaaattatccactgcgcggaatcaggcgtggcgttaataaaataaaacagcgagttgttaaggttttccagcataacatccaggctcggagcaatgaaatcaaaagggatagccagctcatccccgtgcaaactgagcataaatgcagcgtaacagggaggaaaagcagtattgtcttatttggcggcaacatgaagagatttaagacaatggcataaaataacgttgatgataacggcgcaaacttaaattaaccttaaagtacgcaagcgctaagcggctttctgtaaaaatgtgcgctatttcccttgcagcctcataattcgctatctcagttccccgactttcattacactctgcgcggtttttattggcgaagagatggtatgcagaatcgtttacaatcaggcggcaggctgggacgtcaggcgctgctttttcctctctgtctggtgctgtacgagttttctacttatattggcaacgacatgatccagccgggtatgctggcggtggttgagcagtatcaggcgggcctggactgggttccgacgtccatgaccgcttatctggcgggcggtatgttcttacagtggctgcttggcccgttgtctgaccggattggccgtcgtcccgtgatgctggcgggcgtcgtgtggtttattgtcacctgcctggcgacgttactggcgaaaaacatcgaacaatttaccttcctgcgttttttgcaagggattagcctgtgttttatcggcgctgtagggtatgccgcgattcaggagtcctttgaggaggcggtgtgtataaaaattaccgcgctgatggcgaacgtggcgttaatcgcgccgctactgggaccactggttggggcggcatgggtgcatgttctgccgtgggaggggatgtttattttatttgccgcactggccgctatcgcctttttcgggctacagcgcgcaatgacggagaccgccacgcggcggggcgaaacgctgtcatttaaggcgctgggccgggattatcggttggtgataaaaaaccggcggttcgtcgcaggggcgttagcgctgggatttgtcagcctgccgttgttggcctggattgcgcagtcgccgattatcatcattagcggcgaacagctcagcagctatgaatatggtctgctgcaggtgcccgtttttggcgcgctcattgccggtaatctggtgttggcgcgtttaacctcccgacgtacggttcgctcgctgatcgtgatgggcggctggcctatcgtcgcggggctgatcatcgccgcggcggcgacggtggtttcatcccatgcttatttatggatgacggcgggattaagcgtatacgcttttggcattgggctggcgaatgccggactggtgcgtctgacgctcttttccagcgatatgagtaaaggaacggtctcggcggcgatgggaatgctacaaatgctgatttttaccgttggcattgaagtcagtaaacacgcctggttaagcggcggcaatgggctatttagcctgtttaatctggcaaacggtattctttggctactgctgatgctggtcttcttaaaagataagcggacggggaatttgcaaacagtctgagagagcggctacgcctgataagctttctgttatcaggcatagagaggcatccgctagacgttgaacggcggctcgttgtttaatacgctgtcgataatatccagcacgccttcctggttgttcgatccggcgcggtatttcgccgccgccgcgactgcttcgctggcgtgcgacatggcaaaactaaacccggcctgacgcagcatctcaatatcgttgccgccgtcgccgaataccaccacttcactatcatgaatgccccagcgctgctgtaacagacgcaggccgttggctttatgcacgccgggaataattaaatcaatactgccatagccggtatgaacgggaaccatgatatcgccaatggcgtcgtgcagcgccgcctgtacttccggtatccgttcatcggtaatattaaggccgaatttgaaaaagacatcgttgatattattaaaattatccacaaactccagacgatgataatacattgccgcaacggcttttaacgcatcgtcgtagcgtttcagcgtgtaggcgctgttttttccacaggcgatgatctccacatcggcgcgtgtgagcaggtgttcgacaaccgcctggaagtcggcttttgtcagctcgccgttaaaaatatcctcgccttcgctgaccacccagccgccgttttccgcgacaaaagcgatttcgtgcgcaatttccggaaagaacgagattaactggtaatactggttgccgctggccacgacaaagcgaatgccttgccgcttcatttgttggtactgcgccataaaccggtcacggttataggttttttgatcgctcagaaaagtgccgtccatgtcgacggcgattaatttgatactcatgcgttatgctccatcaccggttgcggagtcgatacaggtttggcgacggccttcgccaccagcgccgccagaataaccagcgccagcacaaccatcatggcgctgcgtaatccataatgctctcccagatagcccaacagcggcggcccgaccaaaaacgccagatagccggtcgtggcgacaacgctcacgcgcgtcggcgcgtcgggaccggtatcgctggcggcggaaatggtcagcgggaagccgagcgaagcgcctaagccccaaagaatgaccgagacgccggcgacccagtcgctatcgacaaaaataatcaggccaatgcccagcgctcccatcaacgcgctggcgcgaacaaccgtcacccggctatagcggtcaataaaccagccgccggtaaagcggccaacggtcataccaagcgtgaaaccggcgtagatcagagagccggaggttgggctaaaaccgtgtccgtctaccatcagtagcggtagccagtcattcgcagatccttcggcgaatgccattgccagcaccaccacgccaataagcaaaagctggatgtcccgataaaaaggtaatcctttttcctgaaggtgagaatcttccgatgcgtttttacccgtaccgtcagggatcgcccgaatggcgatgaaaatgggcgcgatcgccacggcagccgcgaggatgatatggatgttagccgggacgcttaatgcggttaacgccatgccgacaccagcgcccgccagcgtgccgaaactgtagaaaccatgcatcatcggcagaacggttttattcagctcgcgttcgaccgccgcgccttcgacattaatcgccacttcggcggcgccaaaactggcgccgaaaacggctaatccaagggcaaaaatcagcggcgaggcgcaccacagcgcgacgctaagaataaccatcccggttactgcacaggtcatcgtcgtgcgaataaccttccgggtgccaaatcgtttcaccagccaggcggaacaaagaataccgctcattgaaccgatagaaagcccgaataagaccgcccccatttccgcggtagagacggaaagaatatcccgaatagcaggcgttcgggttgcccaggaggccatcagcagtccgggtaaaaagaagaacataaacagcgcccaggtacggcgttttaaggcgttacgtgaggagaggacggtcatagcgtcaggccagaaaatagaagcgagaggtaaacattagcaagcttgtgtacatttgtacatatcatcgtcatacttcattgtgcagacagtttttactgtctgttttttcagcgtaagcggcaggctactatcgcctgcatcctgaatgagatgtggaactcatcatgaaagaaaatgccgtaagacgcgccaatgatcctaagcgacgggaaaaaataattcaggccacactggaagcggtaaagacctatggcgttcatgccgtgacgcaccggaaaatcgccgctatcgctcaggtgccgcttggctcgatgacctactattttgccggtatggatgcgttattgagtgaagcttttacacttttcaccgagaacatgtcgcgtcaataccaggacttttttgcgcaggtgacggatgcggagggggcgtgccaggcgataacggaaatgatttacggctcgcaggttacgacgccggataatatggcgttaatgtatcagttatatgcctatgccagcgataagccggcgttaaaaatagtcatgcaaaactggatgcagcgtagccagaatacgctggcgcagtggtttgacgcacagaccgcccgagcgctggatgcgtttatcgaggggatgacgctgcattttgtaacggatcgaacgccgctggcgcgtgaagcgattttacagatggtaaagcgaatcgccggagtgtcaatgtcgtgtcactctgcgttgggcaacaaaaaacccaccaaccttgaaccgaaatggcggggttgatgggctccacaaaatggggacatcaaagaaaagcagtggcaataggtatgactgatgctttaacgaaaagttcgacctattggcaaaattttttcacttaaaggcaaacttcagttttatcctaaccccggccagatgatgacaataagcgtccccgccagcgttagcagaacgttggcgatggcgtaagtccccgcataacccagcgctggaatattactgcgcgccgtatcgctaatgatttccatcgccggggcgcaggtacgcgcgcccatcatggcaccgaacagcagcgcccggttcatgcgcagcacataagcgccaaacaagaagcagatcaccaccggtaccaggctgacgacaagcccggcgatcagcatttgtccgccgaccgcgcccagaccgttgctgataccgctgccggcgcttaaaccaacgcctgccataaacaccatcaagccgaattctttcaccatattaagcgcgccctgcggaatataaccaaaggtaggatggttagcgcgcaggaaaccgagcatgatcccggcgaacagcaatccggccgcgttgccgataccgaaactaaaattgctgaactggaaggtaatcatcccgatcattaacccgatgataaaaaaagcgcagaaggcaagcaggtccgtcacctgactatgaatcgaaataaaaccaatgcgatcggcgatggtttttacgcgtctggcgtcgccgctcacctgtaacacgtcgcctttattcagcacgacgttatcgtcgataggcatttcgatctggctgcggatgacgcggttaaggaagcagccatgatcggtcagcttgagctgagcgaggcggcgaccgaccgcattgtggtttttcaccacaatttcttccgtcacgatgcgcatatcaagcagatcgcgatcaaatacttccttaccattacggaagctgggatcgagcctggcgtgcgcgtccggatagccgaccagcgcaatctcatcgcccatttgcagcaccgcatcgccatccgggttcgccagaataccgttacggcgaatacgttcgatatagcagcctgtctggcggtaaatacccagctcgcgcaggtttttaccgtcagtccaggccaccagttccgggccaacccgataggcgcggataaccggcaaataaaccttgcgattagcatcggtatccagaccgcgctcgcgagcaatttgctgggcgctggtttgcaaatcctgatgctgtagtttaggcaagtagcgcgcgcccacgatcagactgaccaacccaatcagataggtcagggcatagcccaggctcagattatcaagagcggaggagagttgggtgctggcgatgccggaatgtcgcagggtatcgcctgcgccaaccagcacgggcgtggaggtcattgagccggccagcataccggccgtcaggccgatatcccagccgaatagcttaccaaggcctaaggcgattagcagagcgctaccgaccatgaccagggcaagcatcagataatttttaccgtcgcgaaaaaaaatcgaaaaaaagttggggccagcctcgacgccgacacaaaaaataaacagcataaatcccagatttagcgcgtcggtgttaatactgaagtgttgctgccctaataatagagagaccactaaaacgccaatggaattaccaagttggactgaacccagacgtaacttgccaagacacaggccaagagccaggaccacaaataataacaggatgtaattcccatttaacaaatctgcgacgtttatattcacggagactaacttcttgtttacgagtaagctgttgaaagaaatggtaatttacgctactgtttttatcatgaattaagggtgcaatcgtattgcatacagcatccaaataaaaacaacacaacaatatatcctgctagtttaatcttattgcgtactaacggctataagaatcgtgcaggtgtgtttttggcatggaatgccacatgactttatctgactggatgcctcacggcggaaagcgtgttcgatagagagtgtcaggaggaacgattgaaacataaacacgggtgggcaagcgttgtctgctgctttgtactctttattgtggtgtgtctttcattaactatgcatgtacaaggcgcttttcgcgcggcagggcatcctgagattggactgttattttttacgttgcctggtgcggtggccagcttttgttctcaccggcgcgaggtgatccgaccgctgatcggggcgatgctggcggcgccgttttgcctggtgttaatgcgcgtggtatttatgcctacccgatcgttttggcaagaactcgcgtggttatttagcgccgtattctggtgtgcgttaggcgcgctctgttatttgtttattagcagcctgtttagccaccggcgaaaaaaacgccgatagcgccctccgtcagagggcgttgccagagcaatcaggcgaaaagattcagattttcttttgcccatgcttcaaaatccgtacagccgccgatatgtttttgatcgacaaaaatctgcggtacggtttctacaggtttacctacggttttttccaaatccgctttagtaatgccttcagcatggatatcaatatagcggtagttgaaatcgtcgcgttctttgctcagtttttccgccaactcttttgcacgcacgcaataagggcaccctggacggccaaaaataacagtaaacatatctctcctcgaacataaagccagacggcgaacaggtgttatcatgccgcgatttacggcagatgaaaagcaggttacgcctgttcctttgataacccagggctatatctgttaagcacgccggaccagaacgttctacactgtgcgtcagttaaccgggaggcttgatatgcgcacgattggcgtgttacccaaaagcgtactgatactggaatacctcggtatgattttgctggcgcttgctctgctatcgcttaatcattaccttacgctgcccgcgccgttcaatacgccgctggctggcgtattgatggttttcctcggcgtcgtgttgatcctccccgccgcggtggcgatgatgtggcgtattgcgcagttactggcgccgcagttgatgaaacgtccacccgacatttcttcccgttcagatagagaaaagcataatgagtccgaccattgaacttctttgtggccatcgttctattcgccatttcaccgatgaacccgtgactgacgcgcagcgagaggccattattgccgccgcgcgcagcacgtccagttccagttttttacagtgcagctctattatccgtattaccgatcgggcgctgcgtgaggcgttagtgcccctgacgggcgggcaaaagcatgtggcgcaggccgctgagttctgggtattttgcgccgattttaatcgtcatttgcagatctgtcctgacgcgcagctggggcttgccgaacaactgttgctcggtgtcgtcgatacggcgatgatggggcaaaacgcgctgacggcggcggaatcactggggttaggcggcgtgtatatcggcggcatccgtaacaatattgagtctgttaccgaactattaaaattgccgaagcatgtattgccgctctttggcctgtgtttgggatggcctgcggataatccggatctgaaaccgcgcctgcctgccgagcttgtggttcatgagaaccagtatcaaccgcttgatgaaaagctgctggcgcgctatgacgagcagttggctgagtattatctgacccgcggcagtaatacgcgacgcgatacctggagcgatcatatccgtcgcaccctgattaaagaaaatcgcccatttatccttgaatatttgcataaacagggctgggcgacgcgctaaaacctgcgggccagtgtatgatacgcgggcttttcagggttttcagcgaggtgcagggtgaaaattgccatattgtccagggatggaacgctctattcttgcaaacgtctgcgcgaagcggcgatgcggcgcggccatctggtcgagatactcgatcctctttcctgctatatgaatattaatccggcagcgtcgtcgatccattacaaggggcgtcgtctgccccattttgacgccgttattccccgtattggttcggccattaccttttatggtaccgctgcgctacgtcagtttgagctattgggtagctatccgctgaatgaatccgtcgccattacccgcgcgcgcgataagctgcgatcgctacaacttctggcgcgccaggggatcgatcttcccattaccgggatcgcccattcgccggatgataccagcgatcttattaagatggttggcggggcgccgctggtcgtgaagctggtagaaggcacgcaagggatcggcgtggtattggcggagacgcgtcaggctgctgaaagcgttattgatgcgtttcgggggctcaatgcccatatcctggttcaggaatacattgccgaagctaaaggatgcgatattcgttgtctggtcgtcggcaatgaggttgtggcggcgattgagcggtgcgcgaaagccggtgattttcgctccaatcttcatcgtggcggggtggccagcatcgcgacgatcacgccccgtgaacgggatatcgccatcaaagccgcacagacgctggggctggatgtggcgggtgtcgatattttacgcgccgcgcgcgggccgctggtgatggaggtgaatgcctcgccgggactggaaggtatcgaaaagactacgggcgtggatatcgcggggcgaatgattcagtggatagaacgtcacgctacgcctgaattttgccttaaaatcggcggctaatcgcaatcgtggattccgccgtagtacgaagcacgctttttgcgtaagctgtgccggtaattttttcatcgtcatcgtaagaggtagcactttattatgatatcactggtcgttcccactctggatacgttgcgtcaatggctcgacgacctgggcatgaatttcttcgaatgtgatacctgccaggcgctgcatttgccgcatatgcagaattttgacggcgtctacgatgctaaaatcgatttggtggacaacaccgttcttttttccgcgatggcggaggtcaggccttccgcgttgctgccgctggcggccgatctctctgctattaacgccagttcgttgacggtaaaagcctttctcgatatgcaggatgataatctgccaaaactggttgtgtgccagtctttatccgttatgcaaggcgtcacctacgaacagttcgaatggtttgttcgccaaagtgaagagcagatttctatggtgatccttgaggccggggcgcatcagcttctgtttaacgcggaagaagacgcgcaaaaaaccagcgcagttgaccattttcttcactaatcccttccgataatcaggcagtcgctgccagcgcggctgctgtttacacttttttatgctgctattaacctttatttaaagaattattcacctcctttctgaccatttcgctttatcacatagacaaaacctgcataaaaaattgataaaaggcgttttttaatctgggctatagcctcaaaccttagctaaagttattcttgcgaagcttctatagcgagcttgatggcagggagggcgacctctcttcttcatttgtatcaaatgaaaaggtatgcacatttcaggcatgttttaaaccacgcctaatgggttcatttgttaacggatttcagaaggaaagcgatgatgaccgccttaaagaaaaaatggctatcgggtctggttgcgggtgctctgatggtcgtctctgtcggcacgctcgctgccgaacaaaaaacgctgcacatttataactggtcagattatatcgcgccggacacggtggcgaactttgaaaaagagaccgggattaacgttatctatgatgtctttgactctaacgaagtgctggaaggcaagttaatggcaggcagcaccgggttcgatctggtggtgccatcggccagttttcttgagcgccagctcaccgcgggcgtttttcagccgctggataaaagcaaacttcccggctggaaaaacctcgatcctgaactgctgaaactggtagcgaagcacgatcctgacaacaaatacgccatgccctatatgtgggccacgacgggcattggctataacgttgataaagtgaaagcggtgctgggggatgatgcgccagtgaatagctgggatttagtcctcaagccggaaaatctggagaagctaaaaagctgcggcgtctctttccttgatgcgcctgaagaaatttttgccactgtgctgaactatctgggtaaagatccgaatagcagcaaagcggatgactacaccggcccggcaaccgatctgttgttgaagctacggccaaacattcgctatttccactcctcgcaatacattaacgatctggctaatggcgatacctgtgtggccatcggctgggcgggcgatgtctggcaggccgctaaccgagcgaaagaggcgaaaaatggcgtcaatatctctttctcgatccccaaagagggggcaatggcgttttttgatgtgtttgccatgccggctgacgccaaaaataaagacgaggcctaccagttccttaattatctgctgcgccctgatgtgattgcccatatttccgatcacgttttctacgccaatgcgaataaagaggcgacggcgctggtcagccagcaggtgcgcgataacccgggaatttatccgccggcggatgtgcgggccaagttgtttaccctgaaagtgcaggagccgaagattgatcgcgtccgcacccgcgcatggacgaaggtgaaaagcggtaagtaatttattaacggtatggcctgataagcgtgcgctatcgggcattccaccgtttgtatcgtttgattgtgttatgccggagagcgccttgtgaatgatgtcccccaccgcccgcaggtgaaaacccgtaaagcgctgacgccgcttctggaaattcgcaacctgacgaagtcattcgacgggcaacatgctgtcgatgatgtcagtctgactatctataaaggcgagatttttgccctgctgggcgcgtcaggttgtggaaaatcgactctgctacggatgctggcaggttttgaaccgccgagcagcgggcaaattatgctcgacggcgtcgatctggcgcatgttccgccgtatcagcgtccgattaatatgatgtttcagtcctatgcgttgtttccgcatatgacggtagagcagaacatcgcttttggtctgaagcaggacaaactgccgaaggcggagattaccagccgcgtcaatgagatgctgggtctggtgcacatgcaggagtttgcgaaacgtaagccgcatcagctttccggcggtcagcgtcagcgcgtggccctggcgcgcagcctggcgaaacgtcctaagctgctcttgttggatgaaccgatgggcgcgctggataaaaaattacgcgaccggatgcagctggaagtggtggatatccttgagcgcgtcggcgtgacctgcgtcatggtgacgcacgatcaggaagaagccatgacgatggcggggcgcattgccatcatgaaccgtggaaaatttgtgcaaattggcgaaccggaggagatttacgagcatccgacgacccgctacagcgccgaatttatcggatcggtaaatgtttttgagggcttactgaaagcgcgtgaggaggacggtctggtcattgacgcgcccggtttggttcatccgttaaaagtcgatgcagatgcctctgtcgttgataatgtgccggtatatgtggcgctacgtccggaaaaaatcatgctgtgtgagtcgccgcctgccgatggctataatttcgccgtcggcgaagtggcgcatattgcgtatctcggcgatctgtctatttatcatgtgcggctaaaaagcgggcagatgatcagcgctcaactgcagaatgcgcaccgttaccggaaagggttaccgacctggggcgatgaagtgcgtttgtgctgggaagcggatagctgcgtggtcctgacggtataagggggaaacatgagcacacttgaacctccggcacgcatcagtaaacctggcggcgcggcgctatggttggcgcgaatgcaaatgaaacatgggcgtaagctggttattgctttgccttatatctggctcattctgctgtttttattgccgtttcttatcgtctttaagataagcctggcggaaatggcgcgggcgatcccgccgtataccgatctgctggaatgggctgacggtcagttgtcgattacgctcaatctcggtaattttttgcaactgaccgacgatccgctttatttcgaagcctatctgcaatcgttacaaattgccggtatttccacaatctgctgcctgctgctgggctacccgctggcgtgggcggtggcgcacagcaagccctccacgcgcaatatcctgctgctgttggtgattctgccctcgtggacgtcttttttaatacgcgtctatgcctggatgggcattttgaaaaacaacggtgcgctgaacaatgtgttgctgtggctaggggttatcgatcagccgctgacgatcctgcacactaacctggccgtctatatcggcattgtttatgcttatctgccgtttatggtactgcccatttataccgcattgacgcgcattgattattcgctggtggaagcgtcgctggatctcggcgcccgaccgctgaaaacattttttagcatcattgtcccgctcaccaaaggcggaatcatcgccggctcgatgctggtttttatcccggcggtgggtgagttcgtgatcccggaactgcttggcgggccggacagtatcatgattggtcgcgtcctgtggcaggagtttttcaataaccgcgactggccggttgcttctgcggtcgccattattatgttgctgctgctgatagtaccgatcatgtggttccataaacatcagcaaaaaagtgtgggggagcacggatgaataacttaccggtcgttcgctcgccctggcgcattctgattctggtgctggggtttacttttctctatgcgccgatgttaatgttggtgatttactcgtttaacagttcgaagctggtgacggtgtgggcgggatggtcgacgcgctggtatggcgagctctttcgggataccgccatgatgagcgcagtgggactaagcctgacaattgccgcctgtgcggcgacgatggcggtggtgctcggtaccattgctgcggtggtgatggtgcgatttggacggtttcgcggcgcaaacggctttgcgtttatgatcaccgcgccgctggtgatgccggatgtgattaccgggctgtcgctgctgctgctgtttgtcgcgctcggtcatgctatcggctggccctccgatcgcgggatgctgaccatctggttggcgcacgtcactttctgtactgcctacgtggcagtggtgatcgcttcgcgattacgcgaactggatcgttcgattgaagaggcggcgatggatcttggcgcggcgccgttaaaggtcttttttgtcattacgttaccgatgatcatgccagcggtgatctcgggctggctgttggcctttacgctttcccttgacgatctggtgattgccagcttcgtttccggtcccggcgccaccacgctaccgatgctggttttctccagcgtgcgcatgggcgtgaacccggaaatcaacgcgctggcgacgttaatcctcggcgtggtaggaatcgtcggatttattgcctggtacctgatggcgcgagcggaaaaacagcggattcgcgatatccagcgtgcaagacgcggctgaagccactaaaatcttccactatggcaatgcgttgccgcgcgggtcgcggcatcattttcagggaagacattcattgggatttataaagcaatcaacctcatcacatgcccgtttaaatgtgcctacgctggtgcaggttgcggctatggcgattattttgattcgcggtctcgatgtgctgatgattatgaataccctcggcatacgcgggatgggcgagtttattcatcgcagcgtgcagacgtggagcttaaccctggtctttctggccagcttagtgctggtctttgttgaaatttattgtgcgttttcgctggtgaaaggccgtagctgggcgcgctgggtgtacctggcgacacaaattattgtgagcggatatctgtgggcggcgtcgttaggctacgggtatcctgagttgtttagcatcgcgggagaatcgaagcgtgatatcctgcattccctggtcatgcaaaaactccccgatcttttaattctgtttctgctgtttattcccgctcccagccgtcggttcttccggctgcaataatgtgtataatcgtcgccccggataatatgaaggttttttggtatgcagtgcgcactctatgacgcgggtcgctgccgttcctgtcaatggattacgcagtcggttaacgaacaactttccgcaaaaacagccgatttacatcgtttgctcgccgggctgcctgttgaacagtggtgcgcgccgattggcggcccggaacagcatttccgcaacaaagcgaaaatggtcgtgagcggtagtgtagaaaaaccgctcttcgggatgctgcatcgcgacggtacgccggtcgatctttgcggctgcccgctgtatcccgcctcctttgaccccgtattcagcgcgctaaaaccttttattgcccgggccggactcacgccttataacgtggcgcgaaaacgtggcgaactgaaatacctgttgctgacggaaagtcagttcgatggcggcatgatgctacgcttcgtgttgcgttcagaaaccaaacttacgcaactgcgcgcggcgttaccgtggctgcgtgcgcaactgccgcagctcagagtgatcaccgcaaatatccagccggtacatatggcgattatggaaggggagacggaaatctacctgacggatcagcaggcgctggcggaacgttttaacgatgtgccgctgtggattcgtccgcaaagtttctttcagaccaaccctacggtcgccagccgattatatgcaacggcgcgcgattgggtagggcaactgccggtacgccatatgtgggatcttttttgcggagtgggcggattcggcctgcactgcgcgacgccgcagatgcaattaaccggtattgagatcgcgccggaggcgattgcctgcgcgaagcaatccgctgccgagctgggattgacccgccttcatttccaggcgttggattccacccaattcgccaccgcacaaggcgaaacgcccgatctggtgttggtaaatcctccccgccgcggcattggcaagccgttgtgcgattaccttgcacaaatggcgccgcgttttatcatttattcgagctgtaacgcgcagacgatggcgcaggatattcgtcatctgccgaactaccgtattcaacgtgttcagcttttcgatatgttcccgcataccgcgcattatgaggttttagcgttactgcgcaggtcaatataatctattcacaatatttatttttatcccttaactatttcataaaaataataaatacaatcaattgattatttaattcaattggttgtatttatatattaccctatttttgcaaatcaaatcacaaataatcactttaaatcttttaatgactacttttgattattacagtgcgtgtaaggcaaaattagacaaggtggtttatcgggtaactttcaatagcatcagcgaagcaatacgtaacgtcagtaaaggggtcaatcatgacaacgaataggcacgcttatggagggcgttcagacgatgtttgccaaatttatagatgttattcaaacgtttttaactgaaccggcaatattaattgggatattagtcggtgttggctatgcgctggataaaaagacgcctataaaaattatcaccggtatgatcagcgcgatggtcggtttgatgatggtgttatttggcggctttcaattttcagccacttttaaaccggttgcagaggcagtcagcaaagcttatggcgtgcatggatacttaatggattcatacgccatgaaagccgcgacgcaaatagcgctgggcgataatttcggctatgtaggatacgtttttgtactggcgttttttactaacctgttattagttttatttggccgttataccggcgcaaaaggtatatttcttaccggtaataccggggtctctcattcacaggcagtactgtggttaatcgtcttctggctggggttcggttgggtacaatccattgtaattgccggggtattgaccggggtcttttgggcgttttcaactacgcttattgttaaacccatcgccaaagtgaccaataacgccggttttaccattgcgcataaccagatgctgggactgtggtttttctcgaaattcgcgcataaattcggcgatccggaaaagcatgacgccgaaaacctgaaacttcccggttggttagccatttttaaccacaacgtgacggcaatcgccattgtgatgacactcttcgttggcggttttctattggcgacagggatcgataacgtacagttaatggcgaaaggcaaaccctggtatatctatatcatcaatctgggcctgcaattctctatgtatatggtcatcttgctgcagggcgtgcggatgatggttggtgaaattaacggttcgtttaaaggatggcaggatcgctttattcctaacgctataccggctgtggatgttgctgctttattacctttttcgcctaacgcggccacgctgggattcgtcttttgtactttcggcacgattttttccatgggcatcctgctgctcatccatagccctattatggtattgcctggttttgttccgctcttcttttccggcggtcccatcggcgtattagccaaccgaatggggggatatcgttccgttattatttgtactttcctgttagggattattcagactttcggtacggtatgggccattcctttaaccgggctggcaaaagaaggtgtgggctggacgggaatatttgactgggcgactctgtggcctgcaatttgtgaattactgaaatttattgcttcaacgttccatcttggtccttattccatttaattgattcggtttatataaaggattttattatgaaagattctgtaaatattttattcgtatgcggttatggtgtaggcagtagcgtaatgttacagactgttgttaaaaaagcgttagcaaaatatgacttctcttttgatatggagcatacggcagcgggagaggtcggtggatttaccgactgggcagatatttatgcgatttcgaaaaaattgcttgatgttgttagcctcgatcctaaacacggacaatatctcattcccattgaaaatatcatggatggcgaatcaataggtaaacagatttacgatgtggtagagaaaaattttccgcacctgctcaacaaatgagggtgagtcatgaaagcgattattctgctgtttgacagtctgaataaaaactatttgccgccctatggtgatttgctaacgaaagcgcctaactttcaacgcctggcggcacatgccgccacctttgacaatagttatgtcggcagtatgccctgtatgccagcccgtcgggaactgcacaccgggcgctataatttcctgcatcgtgagtggggcccgctggaaccctttgatgattccatgccggaattattgaaaaaagcggggatctacacccatcttatcagcgatcatctgcattactgggaagacggcggcggtaactaccataaccgctatagctcctgggacgtagtacgcggtcaggagggcgatcactggaaggcgagcgttggcgagccgcccattccggaagtactgcgcgttccacaaaaacaaaccggaggcggcgtttccgggctatggcgtcatgactgggcgaaccgcgaatacatccagcaggaagccgattttccccagacgaaagtttttgacgccgggtgcgattttatccataaaaatcatgccgaagataactggttattgcaggttgagacgttcgatccgcatgagccgttttataccaccgaggaatatttatcgctctatgacgatgagtggcaaggcccgcattatgactggccgcgcggcaaagtcagtgaaagcgaggaggcgatagcgcatattcgctgtcgttatcgggccctggtttccatgtgcgaccgcaatctgggacgtatccttgatctgatggatgaacacgatctctggcgcgatacgatgctgattgtcggtaccgatcacggcttcttgctgggggagcacggttggtgggctaaaaatcaaatgccctattataacgaggtggcgaataacccgctgtttatctgggacccgcgcagcgcggtatgcggagcgcgacggcagtcgctggtgcagatgattgactgggcgccaacgctactggattattttcagcaacctattcccgcagatatgcagggccaaccgctggcgaaaatcattgccagtgatgaacccgtcagggaaggcgcgctgtttggcgtgtttagcggacatgttaatgttaccgacggacgctatgtttatatgcgggccgcgcagccggggcgtgagcatgacattgcgaactacacgttaatgccgatcaagatgaatgcgcgttatgacgtggatgaactgggaaaattatctctggcgcctccgtttaactttactaaagggcttcaggtattacgtattccggccagggaaaaatataaaggtgtgaatagctttggtcatctcttgtttgatctcagagacgatccgcagcagcaacatcctattcatgatgaggccatcgaagcaaggatgatcaacttacttatccgtttgatgaaagaaaatgatgctccggcggagcagtatcgccgtctgggtctggatgttgtctaaaaacgtaacaatgttgtaagccgggtgcgcgttagcgtcacccggcaagtattagtccgaatcgcctgttgatgcaggcgtttgagactgatgacaaactgtagaatgctcaatggcgctgcgcttatcaggccaggatagtttccgatggcggcccgtgggctgaataaggtatttatactgccatttcgcaacacggtgggctaatcacatacgtcttactgcgggaaccactgatcgctgattttctgataagtgccgtccgctttaatggcggccagcgcattattcagtttttccagcaacgccttattgtccgggcgcaccgcgatgccaagtccggtaccgaagtattgcggatcggtcactttctctgttgccggacccagttgcggattcgttttcagccactcattgaccactgcggtatcgccaaagacaccgtcaatacggccatttttcaggtcgataatcgcattctggtagctgtcgtaggccacggttttgacctccggatgtttatcctggagatatttttgatgcgtggtgccattttccataccgatacgcttaccttttagatcggtaaaggttttataggtgtcttttttggcaatcaccagcgcggagttcgcataatagggattgctaaaggcgacctgcttactgcgctccggggtaatgtccattccggaaatgacggcatcatattttctgaatttcagcgccgggataagactatcgaaagcatgattggtaaaagtacattctgcctgcatttgcttgcataatgcggttgccagatcgatatcgaagcccacaattttattactcgcatccagggattcaaacgggggataggtggcggaaaccccgaaattgattttttcagcggcgatgctgccagtggcgaaagaggcgagtaatgcagccagaactaactttttcatgatgtcactcccgtaatcttatgattatgcgccgtgtctgcggcatagatttacaatgccatcaattgaatttgtatgcaataaaaatgattaaatattttaaaatggataaaaaaagacggacaggttaaccacttgtccgtcggatttattcaatattatgcatcgtaggtttgataagcgcagcgccatctgaccattgtcgaacggcggcgagaatgccttatcctgcctggttaattgcgccgctcaaacgccagagctttacgctcaatcaaacgcatcatcagcgtcaatagaccgttgacgaccaggtaaattacgcctgccgcgccaaataccaccacatcgtaggtacgaccatagagcaactgactgtaccccatgacttccatcaaggtgatggtataggccagcgaggtacttttgaagaccagtaccacctcattagaataggaggagagggcgcgtttaaacgcatagggcaacaaaatcgccagcgtatctttcttactcatccccagcgcgctacaggactgccactgaccttccggaatcgcgcgaatcgcgccataaaatagctgcgtggtgtaagcggcgctgtttagcgacaacgcgatcagtgcgcacagccacggttcagacagtagatgccagagtagtggatactcttgcagcgtcgggaattgaccgggtccgtagtagatcaggaaaatttgcaccaacaacggcgtaccggtaaacagcgtgatatagccgcgcaccagccacaccacgaacggtgtttttagcgtcaggatgatggtaaaaactaacgccagcaccaaagcgacggcaatagaagccacggtcagcgtcaggctggtgtgtagcccttttagcagttcaggtaaatactcaagcattagtccggcctccgctcaaaacgtgtcgcgcgcaggtctatgcgtttgagaatgtactgactgatcagcgtaatgaccaggtaaatagccgccgcaataatgtaccagttaaacggttcctgggtgcgtgtggcaatacttttggtctgcaacatcagatcgttaacgctgataaggctgaccagagccgtatcttttagcaacaccagccactgattacccagccctggcagggcgtgacgccacatctgcggcatcaccagacggaaaaaaatcgccgtctttgataatcccagtgcctgacccgactcccactgaccagacggaacggctttcagcgcgccacgtagcgtctgcgacgcataggccgcatacagcagggacaacgcaatcacgccgcacaggaacggactgacgtcaaagttctcaatctccatttgcaccgggatctgcgtaaagccgagatggagggtaaacccgtcagacagcgtaagcaggagttgcgaggagccgaaatagataaacagcaccaccagaatttccggcaggccgcgcaaaatagtgaccagcgcggagcctatccaggcaatcgggcgccattttacggactcccagacggcaaagaacatggctaacgcgaggccaatgatcagcgcacagacggcaaggccgacggtcatcccggcggcgcttgctaaaggaaaaaattcgttcatcaaagattacttctggaaccatttgttatagatggtctcgtaagtcccatctttcttcactttttccagcgcagtattgaatttctgctgcagctcggtgttgccctggcgtaccgcgatacccaggccggtgccgaaataatctttatcggtgactttatcgccgaccggcgccagcttaggattggctttcagccattcggtcacgaccgccgtgtcgccgaaaacagcgtcgatacggccattttgtagatccagcttcgcgttctgatagctgtcatacggtacggtggtgatttccggatgcttatccatgatgaatttctggtgcgtcgtaccgttctgtacgccgactttcttgcctttcagttgatcaacgctggtgtatttgccctgctgacccacgaacagcgcggagttgtcgtaatatggcgtggtaaacagcacctgcttttcacgttccggcgtgatatccattcccgccattacagcgtcgaagcggcggaatttcaggctggggatcaggctgtcgaacgcctgattggtaaaggtacaggaggcgtcgatctctttacatagcgcgttggccaggtcgacgtcaaagccgacaatcttgttattagcatccatcgattcgaacggcggataggacgcttcggtcgcaaaacgaatggtctgggctgctgtagcggaaaggctaaagcctgcaattagcgcggcaatcagaacttttttcattgtcattgtcccgaatcttagtgagagagatagtttttgaacgcttcggtctgagggtgggcaaagcaacccgcatcaccgtgctcgacgatgtgaccattttccatataaatcacacgactggcggtcttacgcgccacttcgacttcatgcgtaacgatcacctgagtaatgttcgtttccgccagctcatgaataatgctgacgatttgagcggtaatttccgggtccagcgcggcggtcggttcatcaaacagcagcacctgcggctccatcatcagcgcgcgggcaatcgcgacgcgctgctgctgaccgccggaaagatgcaacggataacgatcgctatagggcttcagacgtaaacgctccagcagcttttctgcgcgcgccagcgcctgatcttttgtcagacccagtacgcggcagggcgcttcaatcagattctgcacaacggtgagatgcggccaaagattatattgctgaaagaccattccgacattttgacgtagctcacgaatcgccttatcggacggcgttttcgtaaagtcaaaatggttcccggcgatagtcagagtgccggagcgcggcatctcaagcagattgagtacacgcagcagcgaacttttacccgccccgcttgggccaagcaacaccagcgtttcgccttcggggcaatccagcgtgatatcgaacagcgcctgatgcgcgccgtaaaagcaattaatgccgtttaattgaatactcattgacactcgtatacaggcagtctgatagctattgaagccgcagatagtacctttcgcagaatagttatgcaatatttatgcgttaaaagttaaatatatcccacattcttccctaaacatagcacaaaatagcaggaggaatagtaggtaagaagaattgtcggcatcccgggcagaatgccagacaatttacggggttatgggtgcaaaagcgggggaatactgtctgttaacggttttctatcgactggcgcagcgtaccggcaggggcatggacatctccgcccagatagcgaacgtcgtcaatcacccagcatgagccttcgtgaatcataagcacttcatcctgccagctttgatcgccctgttttaacgctacccgcagaggaatgttgcgcgcatctcggttcggaatggttgatgcgctggcgacgttggcgctatccggcagcgtagcgcggctggagaacagatcgccgctcatcaactggcggtgctccgtatcgcggctggcgtcggttaacaatttcgccaggttatcactcaagtaggggcgaagcgcggcgatatcattgctgtggtgttgaatacggtagtcgtaaaattgttgagccacgctgtccgggccgccttccacacacgcgccgatacgcgggccattatctttgtaggcgggagtgacggtcgtacaggcgctaagcagaagcgcgcacgggatgagcaaagagagtttagaatagcgcatgatgatttccttataggcgatcgagcaaaaaccgatctacgataatcaattatatcctttcagtgattgcataaccacttaacatcttgttttatctaaataaaattaagcatgttatctttttggggcactcctggggcagtagatgccagttgttgattcagtatatctacttgtgactggttattatcagccatccatgctccatatactgtatagaccatctgagcgtttgagtgccccatttgtgaagcaataaagttcgggttcgcgccagcggcaagcgcccagcatgcataggtatgtcgggactggtatgctttcctgtgtcgcagcccggcgcgtctcaatgcagattcccatatcctgttcagggaaggtgcagcataatgtgctttggatttacctgagcgatcggtaatttgcggattgaagacaaaggtgcaggaatgagtttttgtacgaccgtattcgcgcagctttacttcaattttgtgctgtttgctcagcttcgtgaaagaggcctgactttttaaagcatcaattgctggctgcacaagatgtatcaccctgtcggttcctgcctgggttttcggcagggtgaactctttcgcctgggtatagtttctcctgacaatcaaagtccccgctttgagatcgatatcttcccatgccagcgcgcataattccccatgccgcataccagtataaacagccagtgaccaaaggtttttaatttgctggtgatggcaggcgtcaataagacgtgcaaattcttcacgtgaaagtggatctggttcagctttggcacgcttcaacatagttattccattgaatgggttttgtggaatgtaaccgttacgggcagcaaactgaaataatccagaaacaacccccagataggagtttacagttgccacacttcttccttttggcgctaactcgcggcctggcctggtaatatgatggccggtcattaactcctttctgaaaaagagtaaatcttcctgggttacagaagaagcgagaacccggcctcctaataaagaaacgctgatttttatgatcgactcataacgaagcatggtgtttttggatatctccatctctttaagctttagccacttatccgccagttccgccactgtgatttccttattcacaatcccgaatagtttcaggttcggtgagtcagggaattgcgccgcatagtcgaaagtacctaccttgattgcaaagcagaccgaagccctgagttctccggccaccttgcgatttttgggggtatcaggcacccccagattttcacgaacacgcctccccttgtagtggaagcagatacggagtttgtctccgtgtttttcaacgccggttggataggctggtttagccataattcctcctgcgtccaagagcgtcatcagattaccctctcttcagaaaataagtcaaagatcgacatccggatcgggcatatttctaatccacctgtttatcgttggcaggtggtacaggcattcaccgtttgcctttggcttaccatcaagcgtcatgtgcttatactcacgtccgacgaaccacgcctttttacgtgcgcgtaatatggttcctggcttaagtcctgttgacgccattaacacctcatccgtcacccaatcattgggggctatttgatagataattgtttgcatacccgcctcataccacatcaaggccacggcagtggcaccacgtttcgaacatccgcttaaccacttcccggcagtagaatccgtagtcgtcacgtgtcaggtcatagcggtttccgtaccgctggcgaacccatatctcaaattctttgttcatctccacctcccatagcctgaaccgatcccgttacgccctggtatatgcccgacgtgatagttattgcagaacggacagcggtaaacgcccatctgtccctgatgcccgtaacgcttacgaataatccggagttcaatctgtgcaccgtcagcagttttatgtctttttttacatccgcactgtttgcgtctgagacggcgtttgctggtcattacttcacctccacgccgatcccggcgataacacaactccgctcgatcgcttctttcacctggcgtttataggtttcaggatggaaagtttcgttctttcctgtactgctccagaacgcctttgagctggtgtctggcagggttatggtcaacggtttacctgaggtgacaacgttgcaattttgaagcatggcggcgttgtaaccatcggcgaaaatatcagcctcttcatcgttcagttcagcgcccagcctgaaggcaatatctttcgctattgatgctgtaatttgttgtttgagcacgttcatcgtgtcgcctcccgcgatactgttttgtgcgcacgcagcatgtcgcgggatttaccggacaaaaccgtcttcatgaagaacattccactacggtttgcaactattcctggtgtgcagagcagggcagcatcaaccacgcggttatgtttccggaactcaaacacagtgctggtgatgatgatgttcgccacggcaccgtagtcctgatattcgattttcatcccagatgctccccaataactttgattgcattatcacggcagcgcatcacaacgaattcaggattgccgtaagtcgtgttaataaccggatcgaactgaaaacgtaccgcgccatgttcgccggacggctgcagttgcacgggaataaatttccgctcgcgaccaaacatcttctccggataactgagatatttcgcctggataaccggattgatgctgaaatccgcttttttcgggatcactcgctccatatccggaaaaagtccgtcaaccagtttgatacccgtgattgaaattcggcgttcgaatacgtcccggtgatacgcgttttgttcgaaatttgtgcgggactaaaagtcactcgcaaattttcaagttccgggcctgtaatctggaagtaatgtttaccctcaatgaagcgggatttattgcggttgaagttgcggcgaatattctcagcatcggtgccataacccgcagccagttgctcagtagtgactacgcgttggccgcgatactcaatgatctgtaaatcacgcgccgccactgttgctaattcagttttcatagccatctccacttccctcaatacggtttctgcttcatcatttcgtcccaccgggctgcccatgcatcgtatttctcattccatttttgaatttcacgtttacgggccagaatcaggcgcaggcggcgaatggtgcgctggtgagcacgatggtatgcgtcggtggtttcgccacggcgccatacctgttcgccatggtcctgctcaactagaaaatcagggtggcgctgctttaagccggaccgtgtgaaagagtgcgatgtcagaaagtgggccagccagcggatcgcagtgtcccggctaaaacagcgcttcatgcgcccgtgccggatagcagcgtaaaggtcgccgactggcgtatggtgcttctgtaatgccaggtcaattgcgctggctgtgcggttatccaacatttgatatctcctcaaaacggattcctgcttcgcgagccatttcgataaaagtgtccagtgcgcaaatatgttcatcatccagaagttgccgatcgcatataacgcgcccgttttcgatataaagaaccacgcgcccggtgaagttcggcaaaacgtgcagatcgatattcagaactggtagtgggatctgcatgccgcaatacgtcatcatttgctgtgagttcatcagttgattcctccgctgaaatatttctcttttgcccaggtaatgacttcaccgagcaactcatcaacaataagttttcctgtctcggtcaggtattccgtatgcccgttaatatcaaggctgttcatatacgtactgcgaataaaagaagtggattctgaaattccgtattcactgcacgcctgtctttcaaaacgcattaacagtttcagcattgatttttcgtcaaagtctatcttctgaatatcaccatcgggcatattaacgatgacacagttgctacctgtcttacgtttcatcctctccagtgcagcaattgcaatacgacgacggtaaatttcaattgtgttgtttttcacggcgtttctcctcttcgtccatccagacagaaatacctgatgagatattgagggcaagacccagaagtctcacagtctggagagggggcatttttttaaagctgatgtacattagatccagtagttcattaagacttctggcggagatcgccgcgtcttcaatgttgtcattttcttccgggttccacatatttacctcccgtatgctttgcgtaaaaacaattctgcgataatgttgtagccggaggtatgaaagagttgggctgttttaaacgcagcctggtctttgatgaaagtcatgattaactctctcgtaaattcaggttatagatatccctgccgtttaaggcactgttaatttatttagtccggttttattatttaattaaactattcagttttgtatctgcttctttaatcgattcttccacaccctcgatcagggtgatgatggctgatattaatgtcgcttcgtaatcatcccttgagctttcaaaccatgcagcaagcacagcttcagcctgtttaaccctgtttctggctgagattaaagatatagtcatttatcattccccctgtctgcctgctcttcgataagccatgcatgcacttcaccagataagcgacggattaaagtgattacagatgataattctgtttcgctcaacgtgtccggatagctttctaacattcgtaacagactttcgacctgacatgctttttcggttgcttgttctaaagaaatatcagccatgattgctaccttgtgcgcctgagagaaatgccgcgatctgagatattttattcgttgctattgctaattcagccagatccgaaataacactagagagttgtccgagcctttcttttttatcttcacagccaaaggtcaacgatgctatgttcaaactgatatggctaatcgcttcgagaagagaaatggtttttgaattgcagtcactagcgatattgccgtaatcaatatttgaacaatctccttcgaagcggaagtctttaatatctacgagctggatgaagtttttggtagttgctttgatagtcatgtcactggctccgttgtttgccgatgaaataagcatacgatcaccaaaaatgtctgtcaaacataaatatgtgttacagacatataataagattaagtttctgaattgtatagataataaatatgttttagatacaaaaaaagagccgtaaggctcttttaatatcagttgggttggcttaggcgtggcgtcgaatttgttgagattggctaagtaacaccttgccacaaacatgtaacatttccatttcttccttggtgatttgccactctttgtagagggggttatcagacagaacgagcaattggctcttgattttctgtaagcgtttaacgtacaggtccccgctaaaatcaaatacgtagataccgtcaccatcaaagtagttaacgccaatgtcaacaaaaattagatcaccaggctcaattgtaccttgcatactatcgcctcgaacgttgatgagttttacttggttggctggccgatgcccgaaaagagtttttgcctcttccgtcacgtactctatcgagctgattacttcgataaaatcacggctagaattaccattgcctgcacttgctgaaacatccataacatcgactcgatacacatcatttctcctctgatgtgagagtgaaagaacactgtatttatttacagtatcactatctgtttcagttgaaaatagctcagatacaggcacttggagagcttccgcaattttttgtatgctttgcgcactgtagccctgcatgcctcgctcaagtcgagaaatgtttcctacatcccagtcagtcaaagctgctaactgcgtaatagtcatttttcgggctttgcgtaattcacgaatcttttgtcccactttcacaaacatttctcccatgcagttctgcaatatgtattttatacataaatttgttacctacacaacttaccttgcaaattatgtttattgcacataatatgtgttaaaaacatagagggttatgcgcatgtttacgacaccactacgcaaagctcgactcaatgcaaagctgaccattcaggaggtcgcaacacaaaccaagtgcgacccgggcaatctcagccgcatggagcgaggtattcagcgtccatcaccggaactggctgaaaaactagccaagctgttttgtacggaattaacagaaattcagatcctttatccagagaggttctttcctgatggaaatgccaatcagaacactacaggaaatgcctgaaatttacgggcaagcagataaggactggattattcagcagttagaaagactaacaccagctgtacggcagaaagcggttctgcgttatgccgctgtctaccaggaagcctacgatgccgagcctgtttcataccgaaaggagaaccgggcaaggcatgaggcaaacacaaggcttcgcctgtttgtgagaaatcagggcagagctttacaggggtatacaactcagccgcccctggcaggaactaattcacgttcctgattggtaccgggcttaaaggttcccggtggctgaatctcaaatctcattgcatttgtgtactagttaagtggtacgtacaggattcaatgagaggaggggagggggaggagtgcccgtgtgttagtgcgaagcactggaacaggcttttccaacagtcaggtacataggttaagtagatctctgtaatagggcagaaataaaaaaatgcccgtatcgttaaactagtacaaagagggaaagatgaacacagatctgaagcaaaacttaatcgctctcctggaagagcaattcatccgctccgatgacaaagttgttttcgattatgtgatgcagaaaaaaatcaagtctcagggataccacctgcaacgcaatttcagcatcagcattagcggtggtcgtaaaggctttattgattgcctggttgcatcacctgacggccaacagtgtgccatcgaagttgacaaacgcacacctcgcagccgctcgctgttgaaacttagcgaactgcctgaagggatatctggtttcgttcttctcaaagacggtaagcatcctttgcgttatagcgaaggcggcatcgacgttatccgggcgacgaaatttaagtgaattgaattagaagggtggctggcagcttttggggaggccaccagccatgtgagggggaatccatgaaaaccacatcacaaaatcattatcgcatcgatatgggggctggacaatgctgaccatcacgccaaattttgcccaggaacgcgcgctgaacatgctgcgccgcgactggaagtcgcataatacttttatggtgtatgcacccactggcagcggcaaaacggggttagcagcgtttatcgttgacggtttcgtcagtcgcggaatgcgggtgatgttctgcgtgccctaccagatactgatcacccagaccgccagccgtttcattgagtacggattatcgggtgacgaaatcgggtacgtatgggccagtcatccgaaccataatccggcgctgaaaatccagatagccagcgctgacacgcttattcgtcgtgaatttcccgacaatatcgacctgttgatcatcgacgaagcacatctgcgcaaaaagcgtattttgcaggacattgagcgtctgcgcgccagcggagtaaaagtaattggcctgtcgggtacaccgttttcaccgtttctgggcaaatactatgaccgactgattaagccgaccaccatcggcgagttaatccagcgcggcgatctgagtaaatacgaattttacgctccgacaaagccggatttgaaaggcgtaaaaaccaagtcttcgcttgagtacggcagcgattacaacgaagcgcagctggctgaaatcatgtgcggatctacgctggtgggcgacatcgtacagaactggctggagaatggccgggatctgcctaccatcgctttctgcgtcaacgtagcccacgccaattacctgacaatccagtttaacctggcgggtattaatgctgaggtcatgactgccgacactccagtggatgagcgtcagaccatcattcaccgctttgaaaccggtgcaacgaaaatcatcgtcagcgtgggcgtgctggttgccggattcgacagtgacgttcgctgtatcatctacgcaagaccaaccaaaagcgaaattcgctggctgcaggcgatcggccgcggtcttcgcaccgcaccgggtaaagaatcctgcctcatctttgatcacagcggcactgtgcaccgtctgggttatccggattcaatcgaatatgacgatcttcccggcaagtctgacggcatggaggaaagcgcgcgccgctccagtcaggaacgggccgaaaaactcccgcgcgaatgctcacaatgtcattacatgaaacccgctggtgtgtacgtctgcccgaaatgcggacataagccgctggcaggtgaagacgtcgacaccgacacagggcgtaaactcaaaaagctgggtaaaaatcagcatcgacccacaaaggcacagaaacaagcctggtggagtcagatcaaattttatcagcgccagcgcgtatctcaggggaaaaggcccgtcagtgatggctggtgcgcacacaccttccgggaaaaattcggtgaatggccgaatgacctgagtgacttcccgatggaaattaccccggaggtaagcaactacatcagacacaaacttatcagatatgcaaaaggaaaggggaaggcggccgcacctgctgaaactgccagccccattcccgactcagacattacccacaaggtaataagtgcaaaacgccaggtagagaatattcgcagtatgcttgggagaagaacagcgtgaaaacagcagaagcggcgaaaggccgctggcctgaaattttagagcacttcgacctgccgccgataaccggaaaaaatcactacaggggcgaatgccctgtatgcggtgcacgtggcaagttccgcattgacgaccgcgacggtgccgggacatggatctgtgtatgtggtagtggcgatggcatgaaacttgtcaccctgacacaggggaagccatttaacgagatttgtaccgaaatagaccgtctgatcggaaatgattaccagcgggtgaaaatcccggtaaacagcagcgccaccagcttacgcaagcgtgtgttgagcaagttctctaagctggaggcactgcgtggcacatccggtgctgcgtatctcaattctcgtggaatatttaaccttcctgctgaggcgatccggttcaatgccaggcagagacacaacgggtgtgtattccagtctctttattcccttgctactgacgataaaggggagttgtgctatctgcatcagaccctgcttgatggtgccaaaaaagcagacatcggtagcagttcaaagcgcctcaaatccctgcaggaagataactatctggatcacgctcgttcagtagctatccgcatgtttcctgtcgccagcactctgggtatcgccgaaggcatcgaaacggcgctgtcagcgcaccagatttataaagtgaacacctgggcaaccattaacagcggctttatgaaaaagtttcgcgtaccagcaggagttctgcacctgattatttttgccgaccgcgacgagaacagcgccaccgggctggctgcggcttacgaatgcgctcatgccaatctgatggcaaagaacgatctgcagcgcgtcagtgtgtactggcctgatcacggtgatttcaacaatatgctcatgaatggcgatcaggttcgtgagctggttttccacaagaaaaaggtggctgcgtaatgcgtacagataacaacgaacataaagcactattcaccatcccgacggcagcgcacagctccgccctggtaaacgtcaaacctctgcctgagcaacgtagaatcaccgggcataaacagaccgacgcctatctgtgggtactggaggttatccacctgaatgaacctgcacatctggacgctgcagaagctgcgctggagaaaattaaaatctctccaaaagaggccggggaacggtattcccgttatctgctggcgaatggctgcgatcctttccagatagctttcggcaccatcggcatgaataaccccgcgaacgctattaaatcagcgcgggagaatatcaaaaaggcctctgaagtgcgcgctacgttcggcagctatgaatctgcaatggaggatgttgaggccgagcgagttattaagtcttctgcaaaattcattgatgattatgactggggatggactacggaggaactcgaagccggtcatattgacggcggccgcatgtttgaaattgatgaacagcgccgcgttatggtagacggctaccgtgacgtattgcctgagccccatacgctgtcagatgtggttcgtgaatttatttactgggactggctttatcaggttcgtcacactgcaggcagggaactcggtcacggatatggttattcggaacatcataaatcagtgtgtgaccgtgagcgttatctcgaaaaattgctggcaacaatcaaacctttgtcgcgtgctgaagccgtagaggtgtgccgctggtttctggcaagcggaaaggatgaatatatggaagacaaaggcgcggcggttattcttaatctggttggagagtgtgaagaatgaaactggaagcatcgctaaaacacttcagccctcaggggatgcacatcagcgacagtgtgaaagagacatcgccggatcggcttacaggtaccgatataatggtcgctattggtaccaccagcagccgtgcgcgcttcggcctggctgctttcttcggaaaggccgggatcagcaaaacggatgagcaactggcggttcaggcgctggtgcgtcacgcgatggatactgcaccgaagaacgtgcgcaaagctgcaggtggtgaatttggctggtgtatgctggtactggcgcagtttgcctttgctgagtattcccgttcggcagctaccagcgtgacatgtcacacctgcaaaggcagtgggcgaattacccgaacgcagacaacccgcaaagtgtcttacccgtgggggaaagcgccatactgggccagtaagtcccgcgctgtccgcccgtccgactgggagaaatggacggaggtaacggagatagtgccggcagtctgtgaagcttgcgacggtaagggaacaataagcgcccggtgccgttgcggtggtaaaggtgaagtgctcgaccgcattgcgacaaaagaaagaggtgtgccggtgttcaaaacctgtgaacgttgtagtggcgagggttattccagagtgtcttctgcgaccgttcatcgcgctatccttaaacgtcttccggatctccaccaatcatcctggtctcgcaactggaagccattctatgaaatgctggttgatgtattgtacaaaggagagcgtcaggccgcatcagaatttgagaaggcaacagcttattgatgtaatcggaacaaatggcgacaagtttttgcacgataaggttgactttgcataaacttgtcctgtatgcttctaatcatgcagagttacgcctgttgattattaattctaaatcacccgccaccgtgcgggttttttatgattaatcttgtattcatgtttctttaagcttgttacgtttgtgtgggtgttcaatccatagaatgctaatgtcagaatgatttttataaaatgtttttgctatttcataggcgcagtaattgagtgaatcaaaagcatcctccccacttgaatgcatatataaagacagggcgttattgttaatagcataatgtagccatactccaccgtagtaccagcacgtgatatctttataatcgacagtattggttcccttgtttttattcttgtcattcagccattgtagaagtgttttttctgtattcagatttgtatctgaagtgataacagcttccagaaggacatcatcctggcatgtacgtctcctgtactcccaactatgactgattttatagtatcctggcatttttgttctcctgatagcgatgcagtgtaattttttacttgctgccgataaaaaatcccgctcaagaaaagtaagcggtcagtaaatactgaaggtaaaggggccttgctcctgccgttacacaggtaaacaccagcccatcagcagaaacctgcaagaaactgactggtggcaaccgtgaaacatctcacaatttatatgccattactgtcaggtatgagcagataattcttaaaatgataaaccagctaaattatcatgttatgttactgctgctacagtgaatccccctgtgcggtggggtgtaattggttatcaatggaaacagctgtttgtttgccacacgagtcacggtatagccagccaaagattcaccgggaggcacccggcactgcagcatactgataacaaatatagcgtgtcccaaaggctcacttcggtgagccttttttacaggcgaaaaaaagcccgctacagagagcgggcacctgtatcgtcgcaaaataatgccaaagagatataaggttctacaaatgttcccgtaaagaacatagccttaatcaaaacttatgtaaacttctatccgtagtgcagtagaccttcttgtttcttagagcgtggaggatgtctgctgttaaagttatactttagtaaaccaataaaaacacagttatggcgaatccccctgagcggcggggcgaccagtcaaatatatgttcctcgcgaaccatgtcgactggtatgtggttcaccgggaggcacccggcaccgtaacaaccgaccgccactggctcacccggacagatttctaagctgtaggtacgaggtccgatttccgctgaccgctccagtaaaagtttttcagtatgagatgatgggattaccatagtgactgaaagcggcctgagtttgcatgagtgctggcttattgaatcagtgtaattttctgaaaatgatgctgacaggctcttcgccatataaaagcctgtatagtatcaccgcttataacagtggaaatatgtgttgaatatcagaacactattttgtcagtattagtatgtggatgagagtgtttgtgatacaggagttgaacatgaaatcggttataatggctttgtttctggttccggggttattcatggcatctgctgttgcaaaacaaccagagtccgcagcggtttactcacccgggcggggcgtattatgtgatcagtatttttgcgctgactcaacaggtatttcgtttgttctgacaaagcactatgcaggttctgttcagttaaaaaaactgaaatctatgggggattttgatcgtacagcatttactttttcaaatggcattttttgtgatgtaaaagaaagattatgtcgacaggaccgttactttggcaatgatggtaagcgcagtggcgttgtcaatcagcacttcaccaaaattctatttggaagtaagtgatgtttataaaatgatattttgaatgggcgctgtttttttgcaaaatttttgtgaaaaaatactgacctttgggctcaacgctcattcaaaatttacctgatacttcgtgtagctccgctggtaacgcggcggtggtccatcgttacagggcaaatttcaggcgaaaaaaaacgccaagggaagtggcgggcagtaaatactgaatttgaaaaaaagctacttcatcatcattagcaggggagtctgaacacttgacctggttatgcagacatcaacaccttgcctgacttcatcggttaagttaaacggataaatctcaaataaaccatgtaaaccacagtgttattatgcaggtgttgcggtgaatcccgttagcacggggcaaattgatcatctacttttgttaatcaacgttgcagcagacatgagcgccgcgagtcatggctgatcaaccaaaggctcaccgggtagcgatcggcactgcagcacctactctacccattacttaaatcaaaggctacttcggtagccttttctttttccactcacccgatacccgggtaattagtctcccggacagggggaggtcatgaaaatgcactttgatccccattcgtgggacagttggatcgaactttttcaaagctggtggcggggagacgtacccattggcggcgttgttatggcaatcgttgttgcgtttttccgcatggtctataacggcagcagctggaaagaaacgctgtttgaagggttgctgtgtggttccctgaccctgacggcggtttctgcgctggattattttgatgtgccgaaaagtctgacaatagccattggcggcactatcggatttatcggcgtgaagaaaatcagcaccatcatttcaacgtatttcagtaaccgctttggcggtggcaaccccccacaggtttaatcatgaatgagttacaatttcagcaggcggctggtatcagcgccgggctttctgcgcgctggtttccacacattgatgcggcaatgagcgaattcggtattactgcgccactggatcaggccatgtttattgcacaaacgggacatgaatcagcaggatttactgttctgagggaaagcttcaattattcggtggaggcgctgaagaagacgtttggtaaacgcctgacgccgtatcagtgcgaaatgctggggcgtattgatggtcgccaggttgcccaccagccacaaatagccaatctggtttacggtggccgcatgggtaacaaagacgccggagatggctggaagtatcgcgggcgtgggcttatccagattaccggactggagaattacaccagatgtggcgttgccctgaaactggatctggtggcgaatccgggacagcttgaactggaacgtcatgccgcccgatccgcagcgtggttttttgtgactaaagggtgtctgaaatattccggcgacctggtacgtgttacgcagatcatcaacggagggcagaacggcttcggcgatcggcgggagcgctttgagaaagcaaaatcggtgctggtatgaatctgttacctgtattgctgaaaaaatactggttgcaactctcagtgactttgctgattgctgcacttgcatggacaacagagcattaccgcgacaacgccattcagtataaatcgcagcgcgataccgccagccatcgcctgacgctggcgaacgcgacaattaccgacatgacgaagcgccagcgtgacattgccgccctcgatgccagatatacaaaggaactcgctgatgcgaaagctgagaatgatgctttgcgcgatgatgtcgccgctggccgtcgtcgcctgctcgtcaacgccacctgtcccgcaatgccgacaggtaaatccacctccgccgcccgcgtggataatgcagcccgccccagactggcagactccgctcaacgggattatttcaccctcaaagagcgagtgacaacaatgcaaaagcaactggaaggggcacaggactatatccggacacaatgtttgaagtgaggactaaaatggaagaagccagaattctggtaattatcatgttcctttgtggtctggtgttagggttcgcgtttgggatgatgtgcaaccgggataaccagatataaaaaatccccgcagttaaaacgcagattagatccacgctggatcagcagattgacgctgccgtcgataccgcgctgaccgatatcctcggtagtgatgctgataatacggttacgcagtaggtgagatcaggcattacagcagcccttcagtgaggggctgcgataatatcttatgaaggttagattacaggataaaaattaggtcgaagtaataaccccctttcattgtaatttttccttcagcgtataaatcacaaagagaatcgaatgtttcttcttgatcatcgtctttagggaaccatgaaggctggaaagctcttttccctctttcgtgcataattttttccatgtaaggaataatattctgttttttcattttcaaagcctttgattttaagcgcagagtctggcgctggtttacattaaccaaagttacgtctcgttaagacgtttacgaaaaaataatcccctgtaccactggcacgtaaatcaaattaatagtaactattctcatttgtaaaaaggtactcctggatgataggtcttccacggggcggcagcggcgcgggatttggcgcatttttgatttttcatgcatcatcatcatgttgtaactcattgttttaatatcttttatttttaaaagatgatgatttgtatgtttattgttcatcatcttcggcttttccgggggagggcgcgctaagaaacagccccagaggtaaaaatggacggcgaactgaagaacctcaaatgcaatatcagtcagcttgccgctattacggggttacatcgccagacggttgtcagtcgtctctcgggcgttcccctggcaccgggaagcaatgaaaaaaataagctgtatctcctgaccgatgtgatccgtgtactgatggaagcgcccgtttctcaggctgctgaacatcaggatccgaataaaatgactccaaaagagcgtaaggactggtttgactccgaaaaggggcgtctctggctggaaaaagagatgaagcaggtcgtcccgttgccggaagtccgtcaacaaatggcggcgatagtcaaggccattacgcaggtacttgaagtctggccggataaactggaaagggataagggatggtctgcggatcagctaaacgaggcccaggatgtggtggatgaggtcagaatactgttagttaaggcaatacaggagaccgcagacgatgacggggaataaatatggctctgcagcggcagtacgccgggaggttgctgaatatctcaggcctccacgcagaatgccggtagcggaaggaataaaacaatttatgtttgttccccgcggcgccaatacggcggttccctgggatgacacgttaacgccctacatgaatgaagcgataaatacactgtcaaaacgggaatatgacgcagtgatctttgccgggcccgcgcgaacaggtaaaaccctcgggctgattgacgggtggattgtttacggtattgtctgcgatccggcggatatgctggtggtccagatgaccgaaaccaaagcccgcgagcactccaaaacccgtctggcgcgtacttttcaccacagcccggaagtcagaaagcggctcagtccttcccgaaatgacaacaacgtccacgataaaatgtttcgtgatggttcattcctgaaaattggctggccgtccataaccgttttttcttcgtcggattacaagcgggtggcgctgaccgactatgaccgttttcctgaaaatatcgatggcgagggagatggtttttccctggcatccaaacgtaccaccacctttatgtctgcggggatgacactggcagagagttcgcctggtcgggaaatcaccgatgtgaaatggcgccgttcctcgccgcatgaggccccgcccacgaccggcattctttctttatataaccgcggtgatcgccggcggtggtactggccctgcccgcactgcggcgactggttccagcccgcgatggaaaacatggtgggttaccgggataacccggacctgatggccgccagcgaggccgcgcgtattcagtgcccgcattgtcgggcattaattcagccggaacagaaacgcgggctgaataaccgcggcgtctggctgaaagaggggcagttcatcaataaagatggcgagatcagcggggaggcacggcgctcacgtatcgcaagtttctggatggagggaccagctgcggcgtatcagacgtggcagcagctggtctataaactgctgaccgcggaagaagaatatgagcgcaccggcagtgaagaaacgctgaaggccgttattaatacagactggggactgccttacctcccgcgcatatccctcgatcaacgtaaagccgaaacgctgatagcccgcgcagaaaaacttcccccgcggcgggtgcccgacggtgtccgtttccttgtcgctactgttgacgttcagggcggtaaaaagcgccgtttcgtcgtgcaggtggtcggttatggcagtcatggtgagcgctggattgtggaccgtttcaatatcacccggtcactacgctgtgatgagagcggcgaggccatgcagataaaccccggcgcgtatcccgaagactggcatttactgattacggatgtcctcgaaagggcctggcctctggtcggacatcctgagcaggaaatgagtgtgttatgcatgggggtggactccggcggggaggatggcgtcacggataacgcgtatgcgttctggcgccactgccggcgggaagggcttgccggtcgggtgtatctctttaagggggacagtaccgcgcggtcaaaaatattctccaaaagctatcccaacaataccgggcgcagtgaccgacaggcccgcgcctgcggcgaagttccgctctatctcctgcagaccaatgcgcttaaagaccggatcgcctccgccctcgaccgtaaagagccgggggcaaactacgtgcatattcctgactggctgggtgactggttttttgaagaactgacctacgaagagcgcggcatggatggcaggtgggcgaagcctggcaaaggcgcaaacgaggcgctggatttactctgctatgcccatgccctggtaatgatccgcggctatgaacgtatcaactgggataatccgccgccctgggcgcgcctgcctgagtctgcacaatccagccgcaacacatcagcagcagtcgaccctgaaccagtgacgaatgagagtgaaaatcacgaaatgacagaacaacataacccggcaatgccgtttggcggcgtgtccggcggaggctggttatgacccgggaacagttactgcaactgcagcaggcttattttgacgcggagcttgccgtgcttcaggggaaatccatcaccctgaacggacagtcaatgacgatggaaagcctcggggatattcgccgggggcgaaaggagattgaggatcgcctgcggcttatggactgcgatcgacaactctattcactggcgaggttcacatgaattttctggataaagcgattggcgcgctggctccggggtggggcgcgtcccgcctgcgttcccggatggctatccgggcgtatgaagccatcacgcccacgcgtacccacagggtgaagcgtgaaaatcgaagtggagaccagcttatccagctggccggaaagtcgttgcgggagcaggcccggtggtttgacaacaaccacgacctggtgattggtgcgctggacaaaatggaagaacgcattatcggcgcgaaggggatcatcgttgaaccgcagcccctgacggggaccggtacgctgaactctgtgctggcagaaaaaatccgccggtgctgggctgaatggtctgtttcgccggaggtgaccgggcagtacacccgtcccgttctggaaaggctgatgctgcgcacctggctgcgtgacggggaggtgttcactcaggtgctgaccggaaaaatcagcgggctgtctcctgtggcgggggtgcctttctggcttgaggcgctggagccggactatatcccgctggagaggaccgacaacaacagcaacctggtacaggggatttatttcaacgagtggcggcgtccggtgaaatatctggtctgccagtcctggccgggagcgggcgctgcggcagtcgccgttaaagaggtgactgcggaaaatatgctgcacctgcgctttacccgccgtcttaatcaggcgcgcggcgcttctcttcttgcccccgtcatcattcgtctgatggacctgaaagagtacgaggacagcgagcgcatcgcggcgcggattgccgcgtcgctcggcatgttcatcaaaaagcaggatgtcggcactgacggctatgtggcgccggagaaacgtaaagagacacaaatccagcccggtatgttgtttgacggtctgaatcccggggaggatatcgggatgatcaaatcagaccgcccgaacgcgggtctggaatctttccggatggggcagcttcgtgcggtggccgccggactgcgcggcagcttctcttccattgccagaaactatgacggaacctacagcgcccagcgtcaggagctggtggaggcgcaggaggggtacagcatccttcaggacagctttattgctgcctttacccgtcctctctaccggcgctggctggctgctgcggtggcttccggtgccattgaggtgcctgccggcacggatatgtcctcgctgtttaatgcggtgtattccgggcctgtcatgccgtggattgacccgctcaaggaggcaaacgcctggcgggtgctgatacgtggcggggccgcaacagaaggtgactgggtgagggccagagggggcgcgcctgccgacgtgaaacgccgccgcaaggcggaaactgatgaaaaccgtaagctggggctggtgtttgacaccgatccggcgcatgaaaccggagagcaatccgatgttaaagaggaaaaaaaggaccctgaaaagtccacccagggcgatggcagccgcgcgcgggaagaacgaaagcggcgctgaatcctggtacaccatccgcgcggcggcggataacgcggccgatatcagtatttacgatgaaattggtggctggggaatttcggcgcactggtttgccgaagagctggtggccctggggagtatcacgcagatcaacctgcatattcattccccgggtggcagtattttcgacgggctggccatttacaatctgctgaaaaatcacccggcgagaaaagtggtgtatgtggacggtgtggcctgttcgatggcgtcggtcatcgcgatggtgggcgaccccgtcatcatgccggaaaacgcgatgatgatgatccaccgcccacgcggtattgccggcggtgagtcctctgatattcgcgactatgccgatctgctcgacaagatggaaagcgtcatcatcccgatttacgccgaaaaaacggggaagtcaccggacgatattgccgcgctgctcgccagtgagacctggatgagcggggccgagtgtgtccgggaaggctttgccgacaaagttattcagcccgtccgggcaatggctcatctgcattcaaaacgacttgaggaatttgaacatatgccacagaacgtcaaaaacatgattattgccccccagggtaacgccgggacactgacgcagccggagccggagccgcaggccatcatgaccacgccgccggtggcggtcaccacaccgtcgccacaacctgctaccactgctccggggacggatgaaatcaccctgcgcgcccgttttcaggaagagcagcgacagcgtatcagcgggatccagaatgtgtttggtatgttcggtaaccgccacggcgagctgatggcgcagtgcattgcggatgtggactgcaatgtggacgcggcaaaagacaaactgctggaggcgctgggccggggggtgacccccaccaacacgctgggcgggacgcagaacacacaaaatccgatgctctcccatatctatgcggggaacggtaactttgccggggatggcatccgggcttccctgatggcgcgggcggggtttgaaagcagccaggcggataacccgtataacgccatgaccatgcgggaactggcgcgcatgtcactgaccgaacgtggcgtgggtgtctcgacgctgaacccgatgcagatggtcgggatggcgttcacgcacagcacctcagattttggcaacattctgctggatgtggcgaacaaggccattctgcagggatgggaggaagccccggaaacctacgaactgtggacgcgcaaaggccagctttctgacttcaaaaccgcacaccgtgtggggatggggggctttaattccctgcgtcaggtgcgcgagggggcagaatataagtacgtcaccaccggggacaaacaggccaccattgcgctggcaacctacggggaactgttcagcatcacccgtcaggccatcattaacgacgacctgaacatgctgaccgatgtcccgatgaagctggggcgggcagcgaagtccaccattgccgatctggtttatgccatcctgacctccaacccgaaaatgtccacggacaacgtgaacctgttcgataaggcgaaacacgcgaatgtgctggaaggggcgctgatggatgtggcatcgctggataaagcccgccagctgatgcgtacccagaaagaaggtgagcgtcacctgaatattcgcccggcattcgtgctggtgccgacagcactggagtccgtcactaaccaggtgatcaaatccacgagcgtgaaaggcgcggatattaatgccggcattattaacccggtgaaagattttgcgaccgtcatcgccgagccacgccttgatgataacagccagtccactttttatctggctgccgccaaaggcactgacaccattgaggtggcctatctcaacggcgtggatacgccgtatatcgatcagcaggacggtttcagcgtcgacggcgtgactaccaaagtacgtatcgatgccggggtggccccggtcgatcaccgcggcctggtgaaatgttccgcataaatgtcacagacaactatccgaatggcccgtcagggctttttttacgtctgaaatccggccattcgtgaccggaacggagaaaatcattatggcaaagaattatgtacaggcgggcaccacgctcgccattacggccaccgctgcagtaaagagtggcagcctggtgcaggccggcgatgtgttcgtcgtcgctgtcaccgatattgcggcaggcgccaccggggacggcatcgcccacggcgttttcctggtccccaaactggccaccgatgtgatggcggcgggaaaaaaagtgtatctgaaagacggtaaggtacagctggatgccaccggcggactgccgctggtgggcgtgacctgggcgccggcggcaaaaggggaggaatctgtgccggtacggctcaatggctaatccctttgaccgcctgagcaccaggatggacgaggtgacggctgcccgcttcgggcggcctgtcctgattgacggggcggagtatgttgctgcggaggccacgtttatggcggaactgggtgcgctttccggggaggggacacacctgattgtgttcagcccacagtacaggcccgccagaaagcaggccgtgctctggcgtggactggattttactgtcacccgctggcagcgcgtcaacggaaaataccagatttcactggagtgaatcatgtctctgaaggggctcgaaaatgccattcgtaacctgaacagtctggacaggcatatggtgccgcaggccagcgcctgggcagtcaaccgcgtggcggcctcggcggtgtccgccgccacgcaccgtgtggcgaaagaggctgtggcgggagataaccagaaaaaagggatccctttccggctggtgaaacagcgcgtcagactctggaaggcgagcgcaacgggaaaacactatgcccgtatccgggttaaccgcggcaacctgcccgccatcaaactcggcagtgcacaggtcaggctgtcccggcgcggcgggaaactcctgcgtcgtggcagcgtactgaaaatcggcccgtatctgttccgggatgcctttattcagcaactggcgaacggtcgctggcatgttatgcgacgcgtgaacggcaaaagccgctacccgattgatgtcgtcaagatcccgctggttgccccgctgacgcaggcgtttgaaacggagaaaaaacgtatgctggagcaggagatgccaaaacaactgatgtatgcgctgaaacaacaactgaggctgtatctgacccgatgaacaaacacacccagattcgccacgccgtgctggcgaaacttgaatccctgtctggatcgtccgccatgctgcacgacggtttgccggtctttattgaaccagaagagcttcccgcactggctgtctggttgaccgatgcgcagttcgccgggcagatgcttgatgaacgcgactgggaggccgttctccatgtggcggtatttctgaaagcgcaggccccggatgcggaacttgatatgtggatggaagagaaaatattccccgcactggaagaggtcagaggcctggaaaaccttatcaatacgatgacgccgctgggttatgactaccagcgcgacagtgaaatggcaacgtggggcatggcagaaatcacgtaccggatcacctacaccaactgaggatactgttatgggcgtacccaacccactgataaaaaccaaaggcgccgggaccacgttctggctgtacaccggacgtggcgacgcgtttcacaacccgctggctgatgacgactggcttcgcctggcaggtattaaagatctgcagccgggtgaaatgactgccgatgcggaagatgatgattatcttgatgatgaagatgctgactggaaaagtaccacgcaggggcagaaaagtgtcggtgataccacggcaacactggcctggaaaccgggtgaaaccggacagaagacgctggtggatctgtttgactccggcgaggtccgtgcctttcgcatcaaataccccaatggtaccgtcgatatctttcgcggctggctgagttcactcggtaaaaccattaccgccaaagaagtgatgacgcgcactgtgaaaatcagtggtgtcgggcgtcccttcctggctgaagaagatgcgccgtccgtgatcagtgtttccggggtgaccgtggcgccgttaaatgcgtcggtggctgtcggggccaccaccacgctgacttttaccctcaaaccggatgatgccacggacaaatccctgcgtatcgcatcatccgataccacgcttgccaccgtcacgcaaaaggacaatgtggccaccgtgaaaggggtgaaagcgggcagcgtgactgtcgttggtatcaccacggacggcagcctggtcgctgtggctccggtcacggtcactgccccttaattttcttattcctgccccggctccggggctttgcgggaaaaatcatgtttctgaaaaccgatacctttacatacggtggtcattccgccgtgctcagtgaattgtctgccctgcagcgggtggattacctgatgtttatccagagccgcaccgcggaatatgacgccctgccggagacgctgacggaacaggagcggcaggccgcgtttatgcaaatgggtgtggatatcaatgcctggctggtgtcccgctcgctgtgcgaaagcaaaaaggaagacgacgcccgtcatttatatgacgcggtccgtgcgcagtggtcttttgacgcgctgggactggcagcggataaggtcctgatgctcagcgggatggttgttcctgttgcggatgatgccagtgaggatgacgatacttctgagcaggacgcgctgacaccggaaaagccctgacccgggagctggcatttgtgatgcaactggcgcgggagttccgccgtccggactggcggcggatgctgtcagaaatgaccgcgtcagagctgggcgagtgggcggatcacttcgtccgcttcagtttcagcgatgccctgctcgatgcggagtttgcgacgctgaaagcgctggtgaccgggctggtgacaggtgaagcgcaggatgcggacgattttcgtctgttaagtgcatctgaatctgctccggagaaaactgatgaagaactgatgcgcctgggtgagggtataaccggaggtgtccgttatggaccagatagcgaacctggtcattgatttaagtgtcgatgccgcagactttaaaaatgaagtgccccgcgttaaaaaactgctggatgaagtctcgggtaaaaccgacctcgtcacgcagcggcaaaaaaatcttattgagaccctgaaaagtcaggggcgggcatatgtggacgggagcatcgctgcgtctgatgccggcacgcgccagaaacaggcgatggtcatggcggcgcagggatatgaccaggtggctcagcgtgtcgatatgacgcagcgtcatgttgccgcactgagtcagaaaatgcaggaagagcgtgctcaggccgccgcggtagcagcagcccaggaccaggcgagtgcggcattttaccgtcagatcgacagcgtcaaatcgctggagaatggcctgcagcagctgcagcgtatccagacgcaaatccgccaggcgagaaacagcggtggtattgcgcagcaggattatctggcgctgacttcagaggtggcagcaaaaacccggaccctgacggatgcggaggccgccgccactaaacaaaaagtccggtttatccagcgtctcaaagagcaggtaaccagccagcgactctcgtccaccgaaatattgcgggtgaaagccgcgcagctgggcgtgagcagtgcggcggatatttatatccgccagatggaaaacgcaggaacggtgactcgctcattgggactgaaaagcgcagcagcacgcagagaaattggtgtacttttcggtgagcttgcccggggaaactttggtgcattgcgggggagcggcatcaccctcgccaaccgcgccgggtggcttgaaacgctgatgtcgcccaaaggactggcagtgggtggcactgtcacggcgattgccgctgctgtctatggtctgggaaaagcctggtattcgggaacgaaggaaggggaagagtttaacaaacagctgatcctgaccgggaattatgccgggaaaactgccgggcagttgcagcagatggcccggagtattgccgggaacggcatcacacagcatgatgctgccgggatactggcgcaggtggtgggcagcggcgcgttcggcagtactgacctttcccgggtggcgaatgccgctgcccgtctgaaacaggcgaccgggcaggacatcagcgaaaccatcagccagtttaaaaaactgaaagatgacccggtaaatgccgtggtggcgctgaatgactccctgcatttcctgactgccacgcagtaccagcagatttctgccgcgcaggcggtgggagattcgcagctggcggcggcgctggccatacaggcatactctgacgccgttatgcagcggacaggcgccgtacaggataatctcggctcgctggaaaaggcctggaactgggtgagaaatgcggctgtcggtgcgtgggatgccatgctgggcgtcgggcgcagtcctgacaccgccatgaaacgccaggatatgtttgcacagtggcaggcggcggaaaaagagtatcaggttctgtctcgtaatctgaaggtggatccggactacagtggcagtaatcccctgcagaaggcggatgctgaacgcctgaggaatgcccgccagagtctcgccctgaaaaaagcggcttatgatgaggcggataaagcgtatgcgcaggagggactggctgcagcaatggaaaagcagcgtacggatcaacaggcgcaggcgatacgcagccagcaggaatttaaccaactagtcaaaaacggtacctcgcaggcggaaaaacgtgcgcaggcggaacaggaactgaaccagcttattgcaaaaaaccgccgggacgcaaaagacggggtgaccgccctctggaccgagaaggatatttcatccgcccggacggggatagaaaaacgtttcaaagacccgacccccccaaaaaccgccgccacccgtaacgatgaggccagtcgtctcctgcttcggtacagccagcagcaggcgcaggtggaggggcaaattgcagcagcgaaacagtcatctggtttgaataccgacaggatgacggaagcgcacaaacagttactggctcttcagcagcgcatcagcgacctgtccggtaaaaagctgacggcggatgagaagagtgttctggctcataagactgaacttgttcaggcactgacattgctcgatttgaagcagcaggagctgcagcgtcagagtgcgctaaatgacctgaagaaaaaggcggttcagctggaaagtcagttaaaactggaagaacagtcgcagcgtcagcggcacgatcttgacctggcgactgccgggatgggggatgtgcagaagcaacgttatcaggagcaacttacccttcgccagaaatttgcgcagcagcaggaacaacttgaacgggacagccggcaaaaagggacctacggatcggcagagtacagcgaggcagagcaaaaactccgcgacagcctgaacgtgcagttgaatgaaaaccgccgttactggcagcagttgtccgttgagcagggcaactggaagaacggagccacccgggcatttcagaattacaccgcggatgctggcaatgcggcgggtgtggctgaacaactgttttcgtctgccttcagcagcatggggaacggcctggcgacattcgttaccaccggtaagctgagtttcaaatcctttactgcctctcttctttctgacctggcaaaaattatggcgcagatggcaatgatgcaggccgtgaaaggtgtgggaaatgcgctggggtttggtgtaacggcgaatgctgacgggggcgtttaccagtctgccagcctgagtcggtacagcggtagcgtggtgaacacaccgaccttctttgcgtttgcaaaaggggccggcgtgatgggggaggcagggccggaagcgatcctcccgcttaagcgcggtgctgacggaaagctgggggtggttgccgccggtatggggggaatggcgatgtttgcgccgcagtaccatatcgcgatcaacaatgatgccggtaacgggcagattggtcccggcgcactgaaagtggtttatgacctgggccggaaagcggcggcggactttatcgcacagcagggccgcgatggcggtcgtttaagtggagcttacagctgatggagacatttcactggaaaatacgcccggatatgacaatggaggccgaaccgcaggtcattgctgtgaagatgggggacggatatgagcagcgtcgcccggcaggcctcaatagcaacctggcgaaatacaatgtgaccataaaagtgcgcaaaggcgagcatcagcggctggatgctttcctctcccggcatggcgcggtgaagtctttcctttggacgccaccgtatacctggacgcaaatccgggtggtgagccggaaatggtcggtcagcgtcggggcgatgtgggtgacttacacgaccacgtttgaacaggttgtcgtttaggatatcaatatgttaagtattctccgtttagtatcggtttagttttattgaggaaccatagggctgtaaaggaatctatcagtctgcacaaaatgtgctttttaagtattttaaaaaggagttttcatgaagcaggttctcattgcagtgttgatagtatcagtaacaggtggtttggctcaggctgctggggtaaaaaatacagtatcgctgggttatgcgtataccgatcttggtggcgcgttgtccggtaatgcgagagggctgaatctgaaatataacgcggaagacctgaacagtggttttggtggtatgggatctttcacattcacaactgcagacattcaatcctactctggaggcaaggccggtgatatggattactcgtcttttcttgtggggccttcctatcgatttaatgaatatctgaatgcttatgtaatggcaggcctggggcatggtcatattgacgataagcgtgataactctggaaagaagaccggctttgcatacggtgcaggtgttcagatcaatcctgttgaaaatatcgctattaacgcttcctatgaatacagtcgattttccgcttatgactcgaaagttaacgcgggcacatgggtattgggtgtggggtatagtttctgattattattgcaatttaatattaatttttccgtactatgtaaaccctccgatgcgagggttttttgtaagctcctttggggcgtaatcaatgccacttgctatgcacgtggtttttttttacgggagaggtcatgcgggacattccacaggatacgctgagccaaaccacgaaaaccgagcagtcggcccgcattgatttgtgggaaatcgacctgacggccattggtggccagcgttactatttttcaaacgaactgaatgagaagggcgatccggttacctggcaggggcgtaagtatgacgcttacccgatacagggaaccggctttgagctgtcagggaaagggacatctgcacgaccaacgctggcggtgtcgaacctgtttggtatggtcacgggacttgcggaagatgtgcagagcctggtcgggggcacagtggtcaggcgtgtggtgtatgcccgttttcttgatgcggtgaattttacaggtggcaacccggaggccgatccggaacaggaagtggtcagccgctgggtgattgaacagctgtcggaactgaaaaaaaccacggcgaccttcgtgctggccacgccgaccgaaacggacggcagcgtgtttccggggcggaccatgctggccgatgtctgcaactggacctaccgctctgatgagtgcggttatgccgggccacccgtggcggatgagtttgacaagcccacagcagatccgtcgaaggacgcatgcagcaaatgccgtaccggctgcgagctgcgtgataacctgccgcgcatcggctgcttcctctctataaaccgcctttcctgacggagaacagtatggaaaagactatcctggtgcatgccgcagcgtgtgcaccggcagaatcgtgcggctatgtggtgaacacgtctgcaggggaacggtattttccctgccagaatctttccgctgaaccgacgatgtatttccggatggcgccggaagattatttgcgcgcgcaggcggcaggtgacgtggtggccctggtacacagccatcctgatggtctgccgtttctcagcgacgtcgatcgccgcctgcaggtgcaaagtggcctgccgtggtggctggtctgccatgaccggatatacacatttcgctgcgtgccgttcctcaccgggcgggtatttgagcacggtgtgacggactgttacaccctgttccgtgatgcgtaccatctggccggtattgagatgccggatttttcgcggggagaggactggtggaaaaacggcgagaacctgtatctggataatctggaggcgacaggtttttaccgggtgagtggtgaagaggcacagtccggagacattctgatttgttgttttggttcatcggttgccaatcatgccgcgatttactgtggcaacggcgaactgctgcaccatattcctgatcagctcagtaaacgcgagaggtataccgacaaatggcaacgccgcacacactcgatatggcgacaccgggcatggcacgagtctgccttcacggggatttacaacgatttggccgccgctttagcttcagtataaaaacgggggccgaggctatttacgcgctggccgtgcagataccgggcttccggcagaaaatgaacgagggctggtatcagatacgcatcgccggtcaggatgtggatgaaaccagcgtgtcagcccgtctgcatgagccgctgccggacggggccattattcatattgtcccgcgtattgcaggggctggaaaaggtggtctgttccaggtagtgctgggtgccgtggcaataggcgcgtcattttttacggccggcgcttcaatggctgcctggggggcggcgttatctgccggtgctatttcggcatcctcggtcctgttttctatgggggcggccatgatgctgggtggtgtggcgcagatgctgacgccgcaggcaaaaattccctcgtcccggcagaccgacaatggcaaacagaacacctggttttcgtcgctggacaacatggtggcccagggtaatgccctgcccgtgctgtacggcgaaatgctggttggctcccgcaccatttcacaggaaatcagcacccgggatgaaggtggcggcgggcaggtggtgatcatcggtcgataaaacgagccgccggtcatggacggcccgtggaacagtgcctcacagagtgaattttattttataacgccacaggcgattcgtgcaccaccgcccccaagcgggttgggatgatcttcatggttgtcaccgccggtatggatcatgatggcatggcctttgacctgactgattgatttgaggcgtggggccagaaccggataatcagcgttacctgcctgatttacatacagcgccggaagatcaccgagatgaccttcaggattatacggaccgagatgtttatttgtgtgctgagggtcaaggtgccctccggcagcaagtgctgcgacaggtttaccgtccttcatgccagcatcacagcttccgttctcgtggatatgaaacccatgaataccggctggaagtgaggacaaatgtggggtgaataacaagccatattctgtttcggtaattgtaatattgccgatcttttgacctgtgccattggcatttacaaggttaaccgttgcgtcggtacttgctgctgaggctgcactactgaataaaaatacagcaagtgtcattaactttttgttcatcttaactccattgttgtggttgtggtttttatcaggttgatagtaaagacattaaagtcaaattaattcgattgttgttattgctaatatctattgatgacaaaccgcctctgggcggttttgtcgtttcagagggaacagattatgggtaagggtggtggcagcagtaagacgccgcatgaggctcctgacgacctgaaatccagtcagatgctgaccgttgttgatgccatttgcgaggggccgatcgaaggcccggtggacgggctgaaaagtgtcagaataaacaaaaccccggtcctcgacagtgacggtaacgcgatggttcacggtgtcaccgtggtttaccgcgtgggcgaggatgagcagtctgcgatggaggggtttgaagattccggcgctgaaaccctgctgggtgtggaggtcaaaaagtcagagccggtgacccgcaccattaccaccaaaacggtggaccgcctgcgctttacctttggtgtgcagtcgctggtcagtaccagtaccaaaggcgaccgcaacccgaccagtgtacagatgctgatccagtttcgccgtgatggccagtggcaggtggaacgggatattaccattacgggtaaaacgaccacgcagtttctggcgtccgtggtgatcgatgatttgccgccccggccgtttgaagtccgcatgatgcgcatcactgatgacagtacgtcagacctgctgcagaacaaaacggtgtggtcgggctataccgaaatcattgatgtgaaacagtgctacccgaacaccgctgttatcggggtaaaagtggatgcggaacagtttggcagccagcaggtcacgcgaaactaccttctgcgcgggcgtattgtgccggtcccgtcgaattacgatccggtaaaacggacatatacgggaatatgggacgggacgtttaaacctgcctggacagataatccggcctggtgtgtgctggatatgctgactcacccgcgctatggcatgggaaaccgcattggtgttgccgatgtggacaagtgggcgctgtatgccattgcgcaatactgtgatcagcccgttccggacggcttcggcgggacagagccgcgcatcacctgcaatgcgtatctgacggaccagcgtaaagcgtgggacgtgctgggggatttctgttccctgatgcgctgcatgccagtgtggaacggcagtaccctgacgtttgtgcaggaccggcccagcgataaagtctggacctacacgcagagcaatgtggtgatgcccgctgatggagcgccattcgtctacagcttcagcgcgctgaaagagcgccataatgccgccgaggtccgctacaccgacccgaacaacggctgggaaacctccaccgaactggtggaaaatgacgctgccatccggcgctacgggcgcaacgtccttaaaatggatgcgttcgcctgtaccagtcgtgggcaggcgcaccgcgcaggactgtgggccatcaccaccgaattactggaaacgcagacggtggatttttccgtgggggcagaagggctgcgtcacgttcccggcgatatcatcgaggtctgtgacagtgattatgccggcgtgaccgttggcggacgcgtcctgtcagtcgacagcctttcccgtacgcttacgctggatcgtgaggtggatataccggcaggcggcaatgtggtgctgaacctggtgggcagtaatggccagcctgttaccgtcgcggtcaccgcgcaccccgccccggaccgcgttaccgtcagccagttacccgatggcgtggcggcgtacagcgtgtgggggctgaaattaccggacctgcgccagcgcctgtttcgctgcgtggctatacgggaaaacgatgacggaacgtatgccatcaccgctgtgcagcatgtcccggagaaagagagcatcgtggacaacggagcgaagtttgacccgttgcccggaaccagcatcacgaatacaccgcccgccgtgcagcatctcactacggagattctggcagaagagggacagtatcaggcgcgggcgcgctgggataccccgcgcgtggtgaagggggttaacttctccctgcgcctgacagtgaaagcggaagatgacagcgaccgcctggccagcagcctgaccctgaccgaaacggagcataccttccgcaacctgacgccggggcgctacaccctgtccgtcagggcggtgaacagccagggacaacagggagacccggccagcacacagttcagcatctccgcgccggcggcaccatcatttatcgaactcacccctggctatttccagattacagccacaccgcgtcaggcggtatacgacccgacggtgcagtatgagttctggttttcagacgcgcagattacggatatccatcaggtggaaaacgccgcacgatatctgggaacagcgctgtactggatagcggccagcgtgaatatcaggcccggcagggattactatttttatatccgggcggtaaatcgggtcggtaaatccgcattcgtggaggcgaccgggcaggccagcaacgatgccgcaggctatctggattttttcaaagggcagataactgaaagtcacctgggtaaggagctgctggaaaaagtagatctgacggaggataacgccagcaaactgcagcagttttcgaaggagtggcaggacgcgaacggtaagtggaatgccatgtggggcgtcaaaatagagcaaaccgaggacggcaggcattatgtggctggtctgggcctgagcatggaggatacgccggacgggaagataagccagtttctggtagcagcggaccgcattgcattcattaacccgcaaaacggaaaccagacgcccggattcgtcatgcagggtgatcagatattcatgaacgaggcattcctgaaatacctgagcgcgccgaccatcaccagtggcgggaatcctcctgcgttttccctgacgccggacggtcgtcttactgcgaaaaatgcggacatcagtgggcatattaatgctatttcgggggcgctgaataacgtcgttattgctgaggactgcacgattcaggggacgttgcgggccgaacgtatcctcggcgatatagtcaaagcggtgggtaaagagttcccgtatttcagggagccagccaccggagcaaagcgttacgccagtggcacactgaccgttcagatagatgacgaccagtcatttgaccgccagattattatcccccccatcaattttcaggggagttattacggacgcaatgatacgtgggatacgtgtacgctggaagtgcgccgcaatggcgcgctgatttacagcggaacgagcagcagcgttcctgagtcatacggcgccacgctggatatgcccgccggaggcggcattgtcacactgacatttagtgtcagtaccagggggaacagcacaggatggccgaattccagaataagcgatctgattctgatggttgttaaaaaatccactgcagggattcgtatcagttaaatcattaagagccgcgtaaagcggctttttttatggaggcaatatgccagtacttatttccggcgtactgaaagatggtacgggaatgccggtacagaactgcaccattcagctgaaggcctgccggaccagtacggcggtggtcgtgaatacggtggcatcggaaaatccggatgaagccgggcgttacagcatggatgtggagcaggggcagtacactgtcacactcctggtggaagggtatcccccttcacctgccggagttattacggtctacgttgattcaaaaccgggaaccctgaatgattttctgggggccatgacggaagacgacgtccgcccggaggctcttcggcgttttgaggcgatggtggaagaagttgcccgccaggcatcggaggcatcgcggaatgccaccgccgcagggcaggcatctgaacaggcgcagacatcagcaggtcaggcggcggaaagcgccacggcagcagctagtgcagccggagcggcagacgcatcagccacacaggcggcctcatccgcagcgtctgcggagagcagcgcaggtacggcgaccacaaaagccggggaggcatcagccagcgcggcgtcggctgacacagccagaacggcggcagccgcatcggaggccgcagcgaaaacatctgaagcgaatgcagatgcctcccgtactgccgccggagattcagctgctgccgcagccgccagcgcgacggcggcgcagacatcagcagagcgcgccggagcatccgaaaccgccgcgaagacgtcagaaacgcaggcggcttccagtgccggtgatgcaggtgcgtcagccactgcggcggcagcgtcggaaaaggcggcagccgcatcggcagccgaagcaaaaacatctgagacaaacgcagcaacgtcagcaagtacagcagcggccagcgcaacagccgcctcgtcatcagcatcggaggcatccacccacgccgccgcatctgataccagcgcatcactggcagcgcaaagcagagctgctgccggagaatcggcaaccagagccgaagaggccgcgaaacgggccgaagatattgcggacgtgatttccctggaagatgccagcctgacgaaaaaaggcatcgttcagttgagcagcgccacggacagtgacagcgaagcgctggcgtccacaccaaaagcggtaaaaaccgttatgggtgaggtacagaccaaagccccgctggacagtccggcgctgaccggtacgccaacggcaccaacgccggaaaccacagctgcaggtattgaaattgccacggcagcgtttgtggctgcgaaagtggcacagttggttggttctgcgccggaagcgctggacacgctgaaagaactggctgacgcgctgggtaacgatcctaattttgctaccacggtactgaataaactggcgggcaagcagccgctggacgatacactgacggcgctgtcaggaaaaagcgttgacggtcttatcgaatacattggtttaaggaacacaattgacaaggctgccggtgctttgcccgctggtggtacagctgttgcggcaaacagactggtgtcacgcggcgcacttccggcactgactggtacgacaagaggcagtgatagcggcctgataatgggcgaggtctacaacaatggctatccgacgcaatacggaaatattttacgtctgaccggaaccggtgatggggaaatcctcattggctggagcggggcaaacggtgcgccagcgcccgcatatattcgcagccatcgtgataccgccgacgctgagtggtccgaatgggcaatgctctacaccacactaaacccacctccggattcgcatccagtaggggcggcgattgcatggccatctgatgctactccggcaggttacgctctgatgcaggggcaatcgtttgataaatctgcttacccgttactggctatagcgtatccgtccggcgttattcctgacatgcgaggctggacaatcaaaggtaaacccgccagcggtcgcgcagtgttgtcacaggaaatggacggcaacaaatcgcactcgcacacggcgcgggcacaggataccgacttagggacaaaaaccacctcatcatttgattacggcacgaaatcgaccaatacaacgggcggccatacacatgagtttggcggttatatcaattcatactggggagactcaaatcacacctcatttcagcctggaggtggtgcgtggacacaggccgctggcgaccatgcgcatacagtttatatcggaggacacgagcacaccatgtatatcggcccacacggacacgtcgttattgtggacgcagatggtaatgcggaaaccacggttaaaaacattgcatttaactacatagtgaggctggcataatgccttttaaaatgagcagcaaagcgcagactattaaaattttcaatctgcgttcagatacaaacgaatttattggggcaggtgatgcgtatatcccgccgcacactggattaccggcaaactgtactgatatagcccctcctgatattccctccagtcatattgctgtatttgacgctgaaacccagacgtggaacctgaaagaagaccatcgcggagaaacggtatacgacacaacaaccggtaatcagatgtatatctccgaacccggcccgttgcccgaaaatgtcacatcagtttcaccaggtggtggatacaaaaaatgggatagtaaggctaaggcctgggtgaatgatgaaggtgcggaggttgcagccagacttcgtgaagctgaaggaaccaaaagccgtcttttgcaaatggcatcggggaaaattgcgccgcttcaggatgcggttgatcttggaattgcaacagatgatgaaaaagcgcagctcgacgaatggaaaaaatacagggtactggtaaaccgggttgatacctcaaatcctgattggccggaacaaccagtctgataaaaaatatagctatgtagtagagactgctgctatatgttatatagcagcaatggctattttttgatgtttaattgtatgattttattactggtaaatgacggctaaggtcctggaactcaatacttccattggcttcatagacaacatacagtgtttctttatctacatttttacgatatgaaagacaagagtaacccgccccactggcattaccgactttcggataaaaatcatcaattaactttacttccccggagtataaattgtgagcgtagagagatatatcacttctggtatagtcattattcttgttctgcgcggatgagtgagccgcgacaagtttattgcctgatggaatagtaattgttgaaccttgtactccatgattcctgttgtcaaccttcttgtccatcggaggaaactcagtccatgtttttccaaaatcttttgtttcaaaagaacggcggaggccagagtttctgatgttattaaccaaagaggcattaaattctatgatgttattttctgaaccaaaaccctcacagtatcctgatggcaatgaccatgttattccatcagtggagtatatgaatgatgtattcagaactgtggtgatatttttagtgcgaaccatttgtaccgggaaaaccagtttaccgtcatttagctgaagaccagatccaacaccgccaagcattgcagatatcgttccatttttagttactatatcatggatgttcgtttccacctttgaaaaggtaacgccatcatcggttgatttatataaaaccaaatcccagtcagtgtctggagccttatctctgtatgcgccccatgttttatcattattattccatttgccaaccatgactaagattgtttctcttccctgaatattcgccacgatgcatgtgggatccatgacgcgggaaagtttactgttgacacggtcattataaatcgcaatttttttattccaggttttccctccatctgtgctacgggccgccgctgtgtcaataaaggactgatcgctggcagtgttatggcgcgcatcagcaaatacaacaatggtaccttttgaggttgtacacattgctggaattcgaaaatatttggttgttcccccagagccgctaccgacaatagtgttgcctttttgatcagtaaaatgctcaccttcagctttaaaaaccacggatttttctacagtcatactctttccttccttaatgaatgggtgtgtatgcatatccagtggtggatgcatatacagtattctgcagttaagtagatgtctggtcaaacatatgattaccgttatttctgtttatgtgacgagtagcacagaagagtctttttgaggtaattcttatcaaaaagttagtacagtaattaaatgatgattaatcatttcatcaactcgttaaagaatcgaaccagcagttgaccattatttatgacgtgtggctgtcgacactgtacagaaatttcccggctaatttgagatattggggccaaccgtaaaaatgattccaccaaaaagatcgttaaagtccctaccgatagcttcgagctgacgtctccacgcgattgcaatggcactttgcatccttcggttagtgtaaaacaccacgcaacgctgtccgacgaaattgaacgcaaggttattcttctgttcgggcagggaagatactgatgctatttgcctctcctgtccatgtgctcatcagcaataacgagcaggataataattagtgccaaaataaaacaaactccagtcataataagcgcaaatctgtccatggttcgtactctaaaaaaactgggggtagactggtctgagataccgatatggatagatcatttgacagcccttttagcgtttaaatatatggcatatgacagtgtacagtatgatgccaaagatgatgataactactgtactaataagaataatccagtctgcctgcgtcatcattaaatccacctggattgttaaaaaatcccatccgcagttgcctggatgaggggtaaagttaaaaccacagtagtttaaggattgaaaacttattgtagctatcaaatgatattgtggtaagtaagtctctctacgttgaattgttgcagtataatagattacggggatatgtttgttttttttaaataaaaccgactgagtactgacaacaatttttttcgtttttgccttgcttttctcaggcataaacttcgacgtctggatacccataacttatctgattgatttgtacattgatttaacacaataagccagcgtgaagctacacggtggtataaacatgccttttcgagggattctgccttttcatcttttaccatagtaaagctcctttcgacgaactgaatttagcaaggagaatgttgtgatatatgcaaaaaaagcccacagggtgggcatgaaatcgaacatctggatttacgtattatctttgtaatacttgttttttaacataacgagacaaatacatcactgacaagtagataaaacttgtcgatttattcgttttttatgaataatgacatgcaatactattgattgttgtaaggtgattgaccgatatcattcggtgatttttttataattaattgtgtttttatataacgagctatttgtatgtgaatgttgtcaaatatagggttatccgcactggattttgtggtttttgagttcatacttaattaaggttgctgtcattaccacttaaacaacaaaaagaggatattttatgaaagagattacatttacagaaatggcagatgttagcggtgcaggttcagaaatctatctcactcctttacctggaactgatgcacctactaccggtgatgcaccgtttgttccaggaaagcccggatataaagaaaatgatgttccagacaattctgtatactcaggagacatgaaattgtgtaactgctgctatgaattagcaggtctgtagtcagacagtttgtatcaggaggctaatcgtgtttgagtttggtattcaaccggactcagacacttttaaagtagggaagatgtcaatcgtacaatgttaacattgaaatgaggcagaagtttggggcaccagtggggcaaaaatgacatttttggggtattttggggcagaaaagaacgtatgaaaatcgcttaagatcatacgattttaaaatcgggattttttaagttactgaaaatcatatgctcttggacgattttcgtatgattttaaaaaaaacacaaccacgtcctttcaatgatagcgtatcagcttgataatgcgtttgagatcgtgtgcttagctaacccgggagattcactatgcagttttcaacaaccccaacgctggaaggacaaagcatcgtggagtattgcggtgtggtaacgggcgaagccattttaggcgccaatattttccgcgattttttcgccggcattcgggatatcgtcggcggacgttccggcgcgtatgagaaagagctgcgtaaagcgcgtgaaatcgcttttcaggaacttggcgagcaggctaaagcgttgggtgccgatgcggtggtaggcatcgatattgattacgaaactgtcggcaaggatggcagtatgctaatggtcagcgtcagcggaacggcggtgaaaacgcgccgatgaaagcgctactgtggctggtgggtctcgcgttgctgttaacaggctgcgcgagcgaaaaaggaattatcgataaagagggatatcagcttgatacccgacatcgggcgcaggcggcctatccgcgcattaaagtcctggtgattcactatacggcggaaaactttgacgtttcgctggcgacgttaacgggtcgcaacgtcagttcgcattacctgattcccgcaaccccgccattatatggcggtaaaccgcgcatctggcaactggtgccggaacaggatcaggcctggcatgcgggcgtcagtttctggcgaggcgccacgcgtctcaatgatacgtctattggcattgagctggaaaatcgtggttggcgaatgtccggcggggtgaaatctttcgcgccgtttgaatccgcgcaaattcaggcattgattccgttagcgaaggatattatcgcgcgctataacatcaaaccgcagaatgtggtggcccatgcggatatcgcgccgcagcgtaaagacgatcccggcccgcgcttcccgtggcgcgagctggcggcgcaggggattagcgcctggcctgacgcccagcgtgtggcgttttatctggctggacgcgcgccgtatacgccagtcgataccgcaacggtgcttgcgttactctcgcgctatggctatgaagtcaaagccgatatgacggcacgcgagcagcagcgggtgattatggcgttccagatgcacttccgtccggcgcaatggaacggtatcgcagatgccgaaacgcaggcgattgccgaagcattactggagaagtacggccaggattaacgcggtaaatttccgtgatcgcgcagccaggcggcggtgcgctcaatgccttcgtccagcgtgacgatgggctggtagcccagctcgtcctgcgcgcgagtcgtatcgagcgtaaaatcaaaattcagttttgacacgccgtaatgcgttagcgggggctctttggcggattttttgccgaagcgctccatactgcgggcgatcatatccagcatcgggtaaggcacagagcgaatgcggcagtcgatagtcagttcatcaattaacttttgtacgatgctgcgtaaggtacggttttcgccgttagtgatgttataagcgcggccagaaggcagatgatcgcagcccggctggctggccagccacatggcgtggatcgcattttcatagtaggtcatatcgaccagcgcgctgcccccgtgcggtaataagacgctaccgtaatggtgcatcatatgcgccagacgtgggataaatactttatcgtgcgggccaaacaggctttgcggacgtaacaccgtaaaacgtgtttgcggattggcctgcgccaacagattaatcacctcttcgccggcggctttactgcgggcgaactcattggcaaaccgatgcgggcggaaatcttctttgatatcacggtgatggtggtaatcaaaatagagcgagggagaggagatatgaataaaattgcgcacgccccaggcgaccgcccattctcccagacggcgggtggcgcgaacattcgctagatcgaaagcctgttgggttccccagggcgaggtaaagctggagcagtgccacaacgtgtcgatcccggcaagcatcactttagcctgcgaggagaccagttcggttaaatccgcatggacgaattccgcgcccattttttcaagcagcttgcccatcgcttcattgcgacccgtcgctctgacgctgatgcctttattgcgcaaaaattcaaccgcgtttcgacctaagccgctggtggcgccggtaaccagtaccttcatatcaatccactgtgtttaataaaccgtcgtgcgcattcttccgtgaattacgtcggtatgcaatgggaaacacgaaagaatacagcaactttttctcatttttctgtgatttgttctgcaagtcgggcaatacgccttgccattccccggaaaataaacaggtgcgccgggatcatcagtagccagtaaatcaggcccggcattccgtgtggatgccaccaggcgcgcacgtcaatttcgcggtagcggcctttatcgtgcagcgtgaagctaagccgccccagacccggcgctttcatgccaaacaagagcgtgagctgtttttctggttcgacaatgatcactttccagctatctaccgtatcgccaggcttgagcaaggtatgcgacgggcggcctttcgccagtttatgccccaccagacggtccatcgcggcgcgcgtctgccacaaaatattgccgaaaaaatagccctctttgccacccagccgatttacgacctgccatagcgccgataggctggccggggtctgcgcggtaaagcccgcctgctttggaaaatagccgtattcgggacgccagcgggcgaaggccagcgcgtcgtagccccagtcgctggagttcaccagtttttcttcttctttcagcgtgcggcgaacggcgtcatcaaaggtgataagcgtttgggggatcaacttttttaacgcggcgtcatcggccagcaaatcgtgccttaatccctggattaacgcttttgcggtagttggcggcacggaggtaatgacgtttaaaaaccagaccgaaatccagcgggtcggaaaaggcaccgggatcagcggacgccgtttaccgctgacggccataaaacgttcaaactgctgctgataacttaatacctgcggcccggcggcttccagaatacgatgctcgcgagcagggtggtccagtaagccgaccaggtagtagagtaaattttccagagcgatgggcgtggtgcgcgaacgcacccagcgcggcggcgtgagtattggcaggttgtaaaccatgtcgcgcatgacttcgaaggcggcggagcctgcgccgacgatgatcccggcgcgtaattccgtcaccggtacgcctgcgtcgcgcagcgtgtcagccgtaagctggcgggcgcgcaggtgatcggattgctcatgcgccggtgcctgcagtgaactgaggaaaataagttgtttaaccggcgtctggcgcagcgcgtcgcgcacgttgagcgccgcctgacgctcatgggcgataaaatcgccgccttcgcccatgccgtgtaccagatagtaaacggtatcaatgtcgcgaagcagcgcgggtaaattttccggccagtgcagatcgaccttatgacaactgacgttggcgaggcgctgtttttccagacgttcgatgcgtcgcgccgccgctcgcacctgatgcccttgctgacttagcgcaaagaccaggtgctggccgatatagccgctggcgccgagaaccagaatgcgttgcgccacgttgctctccttagcgggctaaaaaggcgcgccagtgggcgacgacgtcggtaagctgttcgcgagagacatccagatgcgtcaccagacgcacaatcggcgcggcgttaatcaggatattccgttcccgcaaatagtcgccaagcgcggcggcctgtgcttcgccaacgcgaacaaacagcatattcgtttcgtggcgtatgacctccgcgcccgcttcccgaagctgctgcgccagccaggcggcgttatcatgatcctcttgcagacgcgccacgttatgcttcagcgcatacagtccggccgctgccagaatcccggcctgacgcattccgccgccgaccattttacgccagcgcgtcgcgcgtttaatgtaatcgcggttgccgaccagcagtgaaccgaccggcgttccgagaccttttgacaggcagatggtaaaagagtcgcaatactgcgtaatctcttttaactcacagccgtaggcaaccaccgcgttaaaaattcgggcgccgtcaacgtgcagcgccagtccacgttcgcgggtaaatgtccaggcgtctttcagatacgcgcgcggcagcactttcccgttatgcgtattttccagactgagcaagcgcgtgcgcgcgaagtggatgtcatccgctttaatcttcgccgccacgttctccagcggcagcgtaccgtccgcggcggcgtcgatgggctgcggctgaatgctgccgagcaccgccgcgccgccagcttcatagagataattatgcgcgccctgaccgacgatatactcttcgccgcgttcacaatggctaagcagcgcgaccagattggcctgggtgccggtgggtaaaaaaagcgccgcttctttaccggaaaggtcggcggcgtagcgctgaagggcgttaacagtagggtcatcgccgtatacgtcgtccccgaccggggcggtcatcatcgcctcgagcatggcgcggcccggtcgggtaacggtatcactgcgtaaatcaatcatggcacatccctggattttaaaaggtgatgtgcactgttttaccttagccagttcgttttcgccagttcgatcacttcatcgccgcggccgctaataatggcgcgtagcatgtacaggctaaagcctttcgcttgttccagtttgatctgcggcgggatcgccagctcttcttttgccacgaccacgtcaaccagtaccgggccgtcaatggaaaacgcgcgctgtagcgcaccgtccacgtctgcggctttttccacgcgaataccggtaatgccgcaggcttcggcgatacgcgcgaaattggtgtcgtgcagttcggtaccgtcggtaaggtagccgccggctttcatttccatcgccacaaagcccagcacgctgttattaaagacgacgatttttatcggcagcttcatctgtaccaccgagagaaaatcgcccatcagcatactgaagccgccatcaccgcacatcgcgataacctgacgacccggcgcggtagcctgagcgccgagcgcctgcggcatagcgttggccattgacccgtggttaaacgagcccagcaggcggcgcttgccgttcatttttagatagcgggccgcccagacggtcggcgtgccgacatcgcaggtaaaaatagcgtcgtcagcggcgaaatgactaatttgttgcgccagatattgtgggtggatggctttatcgctgagtttggctaagtcatcaagtcccttacgggcgtcccgatagtgctccagagctttatcgaggaatttacgattgcttttttcttccaccagcggcagcagggcgcgaagcgtggctttaatatcgcccactagcgccatgtcgactttgctgtgcgcgccaatactgcccgggttgatgtcaatctgaatgattttggcatcgctcggataaaaggcgcgataggggaactgggtgccgagcaggatcagcgtatcggcgttcatcatggtgtggaagccagaagagaagccaatcaggccggtcattcccacatcataagggttatcgtactcaacgtgctctttgccgcgcagggcatgaacgattggcgcttttagttttgccgccaacgcgaccaactcctcatgcgcgcccgcgcagccgctaccgcacatcaatgcgatattgctggagtagcgcagcagttgcgccagttttttcagctcttcctccgccggcgtgacgacggggagcggggcatggtaccaatgggtgacggcgttttcaggcgcgggtttcagcgccacgtcacccggcagtacgaccacggagacgccgcgatttaacaccgctttgcgcatagcgatggcgagtacctgcgggatctgctccgggctggaaaccaactcgcaatagtggctgcattcacggaacaactcctgcgggtgggtctcctggaaataaccgctgccgatttcactggacggaatatgggcggcgatcgccagaacagggacgtggttacggtggcaatcaaacaggccattgatcaggtgcaggttgcccggtccacatgaaccggcgcacactgccagctcgccggtaagctgcgcttgtgcgccggcggcgaaagcggcgacctcttcgtggcgggttggcatccattcaatggttcccatacgattaagactatcgctcaggccgttcagggagtcgccagtgacgccccagatttgttttacgccagcctgttccagcgttttggcgataaaagcagcaacggtttgtttcatggttctccatctccttaaatgtgataacggttacaagtttagttgaagatgacgatgacgtttttctttggcggagagaggggcgaaaggatgaagcgagtggtaaatcgcccggtggcgctgacgcttaccgggcctacgatggaacgtttaccgattatgcgagaacaagatcgccctgcggatggcaggagcaggccagtacgtaaccttcggcaatctccgcctcgctcagcgtcatggtgctactcaccgtatagtcgccggaaacgactttggttttacagcagccgcaaacacctgcccgacaggcagcggcaaccggtactttattactctccagcgcctccaacagcgtcgtaccgatcggggcataaaattcctgcgctggctgtagcttggtgaatttcaggccgctggttgccgtttccgccaccggcgtgaagaacttctctttaaagaagcgcgttacgccaagcgctttcactccctgttcgacgaaatccatatagggcgccgggccgcaggtcatcacggtgcgcgatgccaaatccggtacgctctgtaacaattccgtggtcagacggcccgcgataaaaccttccgtggcatgattttccgccactagcgtgaccggatactgtcgccactcgtcggcaaaaatcacatcatccggcgaacggacgttaaagatgacctgcacgtcggcctgcgggcggtatttcgccagccagcgacgcatcgacatgattggcgttacgccacaaccggcggcgagcagcagaaacttatcttctgttttatcgtcacaggtaaaatcgcccattgcatcagacagccagatgtaatcgccgcgcttgatgtcatgggtcaaccactgcgaacccgtgccatcgtcaatccgacgaacggtcagcgtaatatattcactgacgcccggcgtagacgaaagggtgtaggcgcgcagcgtttccgctgaattgcgcacgctcaccagcgcatactgcccggcgcggtaagggtagtagtcatggcataatagcgcaattgtccatacatccggcgtctcctgacggatgtgatgcacctgcattcgccagggacactgtgaggttggcatcgtcatcattgacctccttacgcgctcagcaattgcttcatgtcttcttcaacggtggtcacggaacgcagaccgaacttctcgttgaggatagccagcagatccggcgtgaagaagcccggcgcggtcggcccggtgacaatatttttcacgcctaatgacagcagcgtcagcagaatcacgatcgctttctgctcaaaccaggagagcaccagcgatagcggcagatcgttgacgccgcagcccagtttttccgccagcgtcaccgccaggataattgcggagtaagcatcgttacactgaccggcatcgaccagacgcggcagcccttcgatgtcgccgaactccagtttgttgaaacggtatttaccgcacgccagggtcaggatcaggcagtcatccggcacgctggtggcgaaatcggtaaagtagttacgctcgccgcgcgcgccgtcacagccgccgactaggaagatgtgacgcagtttttcacggctgaccagatcgatgagcgtatcggcagcgccgagcagggtctgacggccaaaaccgacggtgatgatatgcggaatttcgctatacgggaagcccgccatttgctgcgcctgggcaatgaccggcccgaagtcatcgccttcaagatggctaacgcccggccagccgacgatgctacgggtccagatacggtcgtcatagctgcccacggtcgggtcgataatgcagttagaagtcatcacgattgggccagggaagcgggcgaattcgacctgctgattctgccagccgctgccgtagttaccgaccagatgcttgaatttacgcagttccggatagccgtgtgcgggcagcatttcaccgtgagtgtagacgttaacgccggtgccttcggtctgctccagcaggttgtagagatctttcagatcgtgaccggagatcagaatgcacttgccttcagtcgctttgacgttgacctgagtcggcgtagggtgaccgtatttggtggtttcaccggcgtccagaatgctcatcactttgaagttcatctggccgatttccattgcgcactccagcagcgcgttcatgtcagcaggccaggtgcccagccaggccatgattttgtggtactgcgcgtaaatgtcgttgtcgtattgaccgagaacgtgcgcgtgctccatatacgccgccgcgcctttcagaccgtacaggcacagcagacgcaggccgaggatgttctcgccaatggcggctttgtctttattcggggtaaattccgccgcctgacgttgcaggtcgcccagatcgtcgctgaccagttgcagatcggccatcggattgtcgcaatgcgcattggcatccacgctcaggcactgcgctttcaacgcttcacgcaaggcaatcgcttcacgggcgtagccgacgatacgcggagagtcgaagttaacgttggtcagcgtggagaaaaacgcgcgcggcgcaaagttatcaacgtcgtgattaatgatgccatattcacgggccttcaccgcccaggcagacaaaccttgcaaagccgcaatcagcagatcctgcagatcggacgtttcagctgttttaccgcacattccctgcgcgtaggagcagccgtttccggctggtgtacggatggtttgttcacattgcacacaaaacatggtcacaccttttaaagttatatttaatatacatgtttaaggttatgcctgtgaacaaagggataaaagggatttctgccataatgtgcagggagattgatttagcgcaattttggcggcagatgcctaccgccaaagaggtatcaggccgagaagaacgccattaagagggggaccagcaggctgaggataaagccatgtacgatagccgccggaacaatctctacgccgccggagcgctgtaataccggcaacgtaaagtccattgaagtcgctccgcacaggcccaacgccgttgaacggctgcggcgaaccagaccgggaataagcataatggctaagagctcgcgggccagatcgttaaaaaatgccgcgctgccgataaccggtccaaacgactccgtcagcaaaataccggaaagagagtaccagccgaaacctgacgccatcgccagggcggtttttagcggtaagtccaggataaacgcattaatcacgccgcccagtaatgagcttgccacgacaacgaccgcgaccatcattccccggcggttaagcacaatttgctttaaggtcatgccgctatttcgtagctgaatccccaccaggaacaataaaaagatcagcgtatattcactggcttcggtggcgtgctgtaaaacagagagtccgctcaggccgatgacaaaccccaataccactacgccgcacagttgcagcgactccagcgccatggcaatacgtgaaggcagtttttcctgctgatgatggtgacgccacgggaggatacgttccagccacaataaggcggcgatattacacaataaaataatcgtaatactgacggcggaataatgaaaaatcgccaccagattactggcgaggttatccaaaaacgccaggcttattcccataaaaaagagaataaggtacacgatccagctcagtagccggttaataagttgtaatgcggctttatgtcgcagtggaatgagatagcccacaatcagtggaaccagaatgattaaaagtcctgaaaacatgaacagccgggcccttttttattgtttgaatagcgtacatgacactaccgaattccagactatcagtaaagcgacaccgtcagccgtacatttatcagacatttgccccaggcaaagggggggaatatcacgccaggcggacgcatttgccgttatactgcggtgaattttatggagtgatgacgtttttctggaggaagcatgattctcgaacgcgttgaaatagtaggatttcgcggtatcaaccgactgtcgttgatgctggagcaaaacaacgtgctgattggggaaaacgcctggggcaaatccagcctgctggatgcgctgactctgttattgtcgccagaactcgatctctaccattttgtccgtgaggatttctggtttccgcctggcgacataaaaggacgcgagcatcacctgcatattattctgacttttcgcgaaacgcagccagggcggcatcgggtacgtcgttatagagcgctggaagcatgctggtcgctttgcgaggatgattttcaccgtattttttatcggctagagggcgaatgcggcgccgatggcagcgtgatgacgctgcgcagttttctcaatagcgatgggcagccattactggtggaaaatattaacgatcaggtgcgccacctggttcgtctgatgccagtgctacgtttgcgcgatgcgcgctttatgcgacgtattcgcaacggtacggtgcccaatgtgccggatgttgaagtcacggcccgacagctggattttctggcgcgtgagctggcgacccggccgcaaaatttaaccgacgggcagattcgtcagggactgtccgcgatggtgcaactgcttgaacactatttctcagagcagggcgcaggacaggcgcgtcaccgactcatgcgccggcgttcgcaaaatgagcagcgtagctggcgctatctggatattattaatcggatgatcgacaaaccgggcagccggtcgcatcgggtgatcctgctggggcttttctccacgctgttacaggcgaaagggacgctgcggttacataaagacgcacgaccattactgctggtggaagatccggaaacccgtttacatcccattatgctttcagtcgcctggcaattgctcaatctgttaccgctacagcggatagcgacaaccaactcaggcgaactgctttcgctaacgccggtggaacatgtcgtacggctggtgcgcgaatcttcccgcgtcgccgcctggcgtctgggcccgggcgggttaagcgcggaagatggacggcgcatcgcctttcatatccgctttaatcgcgcgtcgtcgctgtttgcgcgttgctggctactggtggaaggcgagacggaaacctgggttattaatgagctggcgcgtcagtgtggacatcattttgatgcggagggcattaaagtcattgagtttgctcagtctggcctgaaaccgctggtgaagttcgcccgccgtatgggaatcgagtggcatgtcctggtggatggcgacgaagcggggaaaaaatatgccgcgacggtccgcagtctgcttaataacgatcgggaagaagaacgcgaacatctcacggcgttgcctgcgctggatatggaacattttatgtatcgtcagggctttgccgatgtttttcaccgggttgcgcaacttccgcctaatgtgccgatgaatacccggaaaattatcactaaagctatccaccgctcgtcaaagccggatttggcgattgaagtcgcgatggaagccgggcggcgcggaattgacgccgtgccgccgctgttcagaaagatgttctcgcgcgtggtttggctggcgcggggccgggcggattagcgtttgaatgtggccggaacctgttcgacgacgctatcgagtaatgcatagcggcggcgatactcggcccgttttttactggcgatctccgcttcgctttttcgggcgatcgccagcggcagcgtatagtaattccctttaattctttcaccgcctaacgattcccaaaacgcgtcatagtcggcatgcatttgcgtctttttatccatgtatcgccagctacgataaacgtgcgcatcgttactcacggctataatcttttctgcctgaaagacttgcgcaaactgacagagagcctccatcacgatgcgtttgggaaaaagaccatggcaggctttggtcgcctgctggataatttcgtgagggacgtcgtttgccgcgccctgtaatccgccgataaatagtgtgcgttgttggttaaagcgacacagggtaaatgtgatctctgccagaatacgtaactgtgcgtcgcgaacaacaatagtgctttcaccttctttatccagtgagaccagactgactaaatcaagttgaaacaactcgccggttttagtttcaaatttagcaagattcaggccatactgacttaaatagctaacttgttgttcccgcgataaaagttggcgcatctgttgataatgaaaacacagcgcatctaaggcgaaatcgcgtttaatatttacagccatataaggacgatgtagccgaataggcaaacgcggctgacgagcaagtaacgtatttaactccggccattgggtgagattggtcagtaattggctggtcgcacgcggcatgactaatgagcggattaaaaacttgcgacgaaagctggctttacgccagaattttcctggctgtaattgcccgcgcgtcagacgaataaataattgtaaaggagagatgtaatctgaagtgtaccaggtattatctgtaagctgtgtcatgatcgtaatccgcgacataagattgtcgagattgaaccacaggaaacattaaccaatcgtcaatacagccggcgctatctttattgcgtcaggtttgtttagatacggtttactttctggttaaaattttgccgtcagggtttctatgcgtgctaagggaaagaaatttaaaaagcgttatctggtcattattttaattcttttagtgggggggatggctggctggcgaatgataaatgccccgctgccaacttatcagacattaatcgtgcggccaggcgatcttgaacagagtgtactggcgactggaaaactggacgcgttgcgtaaagtggatgtcggcgcgcaggtgagcggccagttgaaaacgctgctggtctccattggcgataacgttaaaaaagatcagctactcggcgtgattgacccagatcaggcggagaaccagataaaagaggtcgaggccaccctgatggagctgaacgcggagcgtcagcaggcagccgctgagttaaagctggcgcgggttacgctggcgcgccagcagcagttagctaagactcaggcggtatcgcaacaggatctggataccgcggcgacggagatggcggttaaacaggcgcgtattggcaccatagatgcccagatcaaacgtaatcgggcctcgttggacaccgcgaaaaccaacctggaatatacccgtattgtcgcccccatggcgggggaagtgacgcaaatcactaccctgcaaggacaaacggtgattgcagctcagcaggcgcccaatattctgacgctggcggatatgagcaccatgctggtaaaagcgcaggtctcggaagcggacgtgatccatcttcgggcggggcagaaagcatggttcaccattgcaggcgatccgcaaacgcgctatgaaggcgttttaaaagatattctgccgacgccggaaaagatcaacgacgctattttttattacgcccggtttgaagtgccgaatcccaaaagaatcttgcgtcttgatatgaccgcacaggtttatattcaactcatggatgtcaaaaatgtgctgattattcctctcgccgcgcttggcgaaccggtgggcggcaatcgttataaagtggcgctgttgcgtaacggcgaaaaacgtgagcgcgaagtggtcattggcgagcgtaacgatacagacgtggaagtggttaaaggtctggaagcgggcgatgaggtgatcatcggcgaaagcaggccaggagcgacgccatgacggcattgcttgaactgtgcaatgtgagtcgtagctacccctccggagaagagcaggtggcggtgttgaaagatatctccctgcaaatccacgccggggagatggtggcgatcgtcggcgtttccggttctggaaaatcaacgctgatgaatatcctcgggtgcctggataaaccgaccagcggcacttatcgggtggcggggcgggacgtctcgacgctggacccggacgcgctggcgcagctgcggcgtgagcattttggctttatctttcagcgctaccatctgttgtcgcatttaacggcagcgcaaaatgttgaaatccccgccgtctacgccggcattgaacgcaaaaaacgccaggcgcgcgccagagagttgcttttgcggctgggattaagcgatcgcgtcgattacccgccttcacagctttctggcggacagcagcagcgtgtcagtattgcccgcgctctgatgaacggcggacaggtgattctggcagatgagccgaccggcgcgctggatagccattccggcgaagaggtgatggcgattttgcgccaactgcgcgatcgcggacatacggtgatcattgtgacgcacgatccgctgattgccgcccaggcggagcggattattgaaattcacgatggcaagattgtccataatccgcccgcgcaggaaaagaaacgcgaacagggcgttgacgctgccgtagttaatacggctcccggctggcggcaatttgccagcagctttcgcgaagcgctgtcaatggcgtggttagcgatggccgctaacaaaatgcgtactttactgaccatgctgggaattattatcggtattgcgtcggtggtgtcgattgtggtggtcggcgacgccgcaaaacagatggtactggcggatatccgcgctatgggcactaacacgattgatattcatccaggcaaagattttggcgacgacaacccgcagtatcgacaggcgctgaaatatgacgatctggtggctattcagaaacagccgtgggttaactctgcgacgcccagcgtttcaaagagcttacgtcttcgctatggcaatattgatattgccgtaaatgctaatggcgtcagtggcgattattttaacgtttacggcatgtcctttagggaggggaacaccttcaatgctgtacagcaacaggatcgcgcgcaggtggtggtgctggatgccaacacgcgacgccagctatttccaaataaagcgaatgtcgtaggggaagtggtgctggcgggtaatatgccggttattgttattggcgtggcggaagagaaaccgtccatgtacggcaatagcaatctgttgcaagtttggttgccctatagcacgatgtcagatcgcataatgggtcagtcatggcttaactcgatcaccgttcgtgtgaaagatggcgttgatagcgatcaggctgaacagcagcttactcgcctgctcaccttacgccacggtaaaaaagacttcttcacctggaatatggacagcgtcctgaaaacggctgaaaaaaccacctatactcttcagttatttctgacgctggtggctgtcatttcgctggttgtcggcggcatcggcgttatgaatattatgctggtttccgtcaccgagcgaacgcgtgaaatcggcatccgtatggcggtaggcgcgcgcgccagcgatgtgctacagcagtttcttattgaagcggtgctggtttgcctggttggtggagcgctggggattagcttgtcgatgttcatcgcatttatgctacagcttttcctgcccggctgggagatcggtttttcactgactgcgctggcgagcgcgtttttatgttcgacgtttaccgggatactgtttggctggctaccggcgagaaacgcggcgcgactggacccggtggatgcgctggcaagggagtaatcttgctgacgtcatttgtcggcctgataagatgcaacagtgtcgccaccaggcactggcgttaaataaaaatgccagccgatcgggctggcattttgcctcctggatgtacacaatgagacagaggagctatgcaacggcctctgcttcgatgggcacgatgacgctggcgtgattgccttttggcccctggtggacatcaaaccggacagactgtccggctttaagcgttctgtaaccatccatttgaatggtggaataatgggcgaaaatatcctcgccgccgccttcagggcagatgaaaccaaaccctttggcattgttgaaccactttacagtacccgtttccatgcttcgacatccttcgtaaatcttatataagtaagatggaatgaaccggtgacggagtgggggctgttcaaaacctcaccaactctcgacattacaatttagagaaatcaggcgaggcgtcaagcatcaggcaggggggatcgggtaaaaatgaatcaaaaatttgaagcagttaacgctattgccgggaatgtgacagatgtcgcggatggtactgatagatgttagttatctatcaattgaggtagattgattgtgtgcatagactctggtcagcggcagattttcctgccgacaactgtaaccgataatgacgactgacaatgggtaagacgaacgattggctggattttgaccagttggtggaagatagcgtgcgcgacgcgctaaaaccgccatctatgtataaagtgatattagtcaatgatgactacactccgatggagtttgttattgacgtgttacaaaaattcttttcttatgatgtagaacgtgcaacgcaattgatgcttgcagttcactatcaaggcaaagccatctgcggcgtgtttaccgccgaggtggcggaaaccaaagtggcgatggtgaacaagtatgcaagggagaacgagcatccgttgctgtgtacgctggaaaaagcctgaatgcaggtataaaaattgggggaggtgcctatgctcaatcaagaactggaactcagtttaaacatggctttcgccagagcgcgcgagcaccgtcatgagtttatgaccgtcgagcatctgttgctggcgctgctcagcaacccatcggctcgcgaagcgctggaagcatgctccgtggatctggtggcgctccgtcaggaactcgaagccttcattgaacaaaccacacccgtactgcctgccagtgaagaagagcgtgatacgcagccgacgttaagtttccagcgtgtcctgcaacgtgccgtcttccacgttcagtcttccgggcgtagtgaagtgactggcgcgaatgtgctggtggctatctttagcgaacaggaatcacaggcggcttatctgctgcgcaagcatgaagtgagccgtctggatatcgtgaactttatttctcacgggacgcgaaaagacgaaccgagccaatcttccgatctcggcaatcagccaactggcgacgaacaagctggcggggaggaacgtatggaaaacttcacgacgaatcttaaccaacttgctcgcgtgggcggcatcgatccgctgattggtcgtgaaaaagaactggaacgcgcgatccaggtcttgtgtcgtcgccgtaaaaataacccgttgctggtaggggaatccggcgtcggcaaaacggcgattgccgaagggctggcctggcgtatcgtgcagggcgatgtgccggaagtgatggccgattgcaccatttactcgctggatatcggttcgctgctggcgggcaccaaataccgcggcgattttgaaaaacggtttaaggcgttgctgaaacagcttgagcaggataccaacagcatcctgtttatcgatgaaatccataccattatcggcgctggcgcggcgtcgggcggacaggtggatgcggcaaatctgattaaaccgctgctttccagcggtaagatccgggtgatcggctcaacgacctatcaggaattcagcaatatttttgagaaagaccgggcattagcgcgccgtttccagaaaattgatattaccgagccttcggtggaagagacggtgcaaattatcaacggcttgaaacctaagtacgaagcgcaccacgacgtgcgttataccgcgaaagcggtgcgtgcggcggtcgagctggcggtaaaatatatcaatgaccgccatctgccggataaagccattgacgtgattgacgaagcgggcgctcgggcgcgtctgatgccggtgagcaaacgtaagaaaacggtcaacgtggcggatattgagtccgtagtggcgcgaattgcgcgaattcctgaaaagagcgtctcgcagagcgatcgcgatacgctgaagaacctgggcgatcgtctgaaaatgctggtcttcggccaggataacgcgattgaggcgctgaccgaagctattaagatgagtcgtgcgggtctgggccatgagcataaacctgtcggctcattcttgttcgccgggccaactggcgtagggaaaactgaagttacggtacagctttcaaaagcgctgggtattgagctgttgcgcttcgatatgtctgaatatatggagcgtcatacggtgagccgtttgatcggcgcacctccgggatacgtcggtttcgaccagggcgggctgctgacggatgcggtgattaagcatcctcatgcggtgctgttgctggatgagatcgaaaaagcgcacccggatgtctttaacctgctgctgcaggtgatggataacggtacgctgaccgataacaacggccgcaaggcggatttccgcaacgtggtgctggtgatgaccaccaacgctggcgtgcgagaaaccgaacgtaaatctattggtcttattcatcaggacaacagtaccgatgcgatgggcgagatcaagaaagtgtttacgccggagttccgtaaccgtctcgacaacattatttggttcgatcatctgtctggcgaggtgattcatcaggttgtcgataagtttatcgtcgagttgcaggctcagttggatcagaaaggcgtctctctggaagtcagtcaggaagcgcgcgactggctggcggaaaagggctatgaccgggcgatgggcgcacgaccaatggcgcgtgtgattcaggataacctgaaaaaaccgctggccaatgagttgttgtttggatcgctggttgacggcggacaggtcaccgtcgcgctggataaagagaaaaatgcgttgacgtatgacttccagagtgcgcaaaagcacaagccggaagccgcgcactaatcttcgtttcactgtcgtacaaaccgggccttagcgcccggtttttttgtctatggaaaacccccagctaggctgggggttccggaaagctttcagctttaagccagttattaaaaccccttttgatttgttaaaacatcttgcggtctggcaactgcaaaagttcaacaagaaatcaaaagggggtcccaatgggggacgaaaagagcttagcgcacacccgatggaactgtaaatatcacatagttttcgcgcccaaataccgaagacaagcgttctatggagagaagcgtagggcagtaggcagcatattaagaaaattgtgtgaatggaaaaacgtacgaattctggaagcagaatgttgtgcagatcatattcacatgcttctggagatcccgccgaagatgagtgtgtcgagtttcatgggatatctgaagggtaaaagtagtctgatgctttacgagcagtttggggatctaaaattcaaatacaggaacagggagttctggtgcagagggtactatgtcgatacggtgggtaagaacacggcgaagatacaggactacataaagcaccagcttgaagaggataaaatgggtgagcaattatcgatcccgtatccgggcagcccgtttacgggccgtaagtaacgaagtttgatgcaaatgtcagatcgtatgcgcctgttagggcgcggctggtaagagagccttataggcgcatctgaaaaacctccggctatgccggaggatatttatttacgccggataatagttagcctgatagcgttgtgctcgcggtaggcggataaggcgcttgtaaattgcgtcatcatccggtaatcgacgggtcaaatgcgaaaaaaagtccgtactttcgtacgaactctttcttgaatatggcggtgaggggggattgactcgctgcgctcgcccttcgggcagtctcctcgcaggctcgtcgtttgtccaactggctgcgccgctactcagcccatccctgggcctcgccccttcggggccagagcaagctctgttcaaaaacgctcccggcgtttttgtgtcgaaccccggtcgggtgttctcatcccccctgtagggtggctttattgactagtcctgatataggttgacagttttttgtctgtaaaacgcctgatgaacatcatcgggcgttttgtatttcagggccaggtgtggccgttcatggttataaattgccacggactcttttactatttcccgcgcttgctccaggtctgcaggacgcgagagtaaaaactcatttttcagtatcccgtttattctctcagccagcgcattctggtagcagtcgtaaccatcggtcattgaacaggttattccgtttcgctcatgaactgactgataaagtaccgaacagtattgcagtcctctgtcagagtgatgtaccagcggacctgtcgtttttctccgcctcagagcctgcctgaacgcctttaccacattttctgtctgcaggttttccccgacatggtaacccacgatttttctggagcaggcatcggtgaccagactcagacaggccgtgccgctgcgtagtggaaggtaagtaatatcggcgacccagacctgctctggctcaagggcggtaacctgttcagggccgggtttcagcagattaggatgccggtaaaagcgatgatggctgttggtggttttgtgatatgcccgtttcacgggtaccaggagccggtattcacccagcagattaaacagacggtcccgtccgatattcagcgttttatcggcctgcatgttcagcagatagtgcagtttacgcgtaccgattcgcggctggcggcaccgggtacgggcaacaaaatcaagaacctgagcatgatgctcctgccgtttattacatcttgtattgtactggtaccacgcctgtctgctgtgccccaggaactgacatgcacgcgtaactgttattttgggggcctgactttgcgtgaggacttgccgggccgcttttttacaacacttaccccgtaatcatttttcaggacgttgataacggactcaaaaaactcagctttctggtttgccagctcaagctgttcttcaagttccctgattctttgctcgggtgtcagcgggatagttgtctgagccacaggcagtttcctcttcaccaggtcaggaagtccgggtctccagtcaagccggccatatttacgcagccagacaagtacggtggagcgcccctgaatgccatatcgctgctgggcctgtttataggtcatctcgcctttttcgacctgctcaacgacggctattttaaaggatagaggataatcgcgttgggtgcgtttgaactcagtcatcatcacgttctccggatttaagtctggaacgtgtcaacgctattcaggacgggtcatatgtgaaaaaaaagcccgtactttcgtacgagctctttcttgaatatggcggtgagggggggattcgaacccccgatacgttgccgtatacacactttccaggcgtgctccttcagccactcggacacctcaccatattgtattgctgcctgaccacttggggggcaacggggcgctactatagggagttgcgctaaaacggtcaagcagaatttacatattcactgtcgtttgctcatgcaatagacataatccccgcccaaactggcgcggggaggcaaattaacgctgtgaatccaacatttcgttgtttttcaccacatcctgcgctttgctgtagctttctatcagcagttgataggccgggaatacctgagtataaacgtcggcccacgcggcggcgtcttcacggttccaggtgccttgcagctcagaggcgactgcggcagtatccatcggtacgacgccagcctgtacgatacgcgccagggtgatctcctgcgccatcttactgtaggtaccggatgcgtcgatcacggcaaataccttataaccttccgctaccgcgctaatggccgggaatgccatgcacacgctggtaatcgtcccggcaatgatcagcgtcttacgacccgtcgcttttaccgccttaacgaaatcttcgttatcccaggcgttaatttcacctttgcgcgcaatgtactgcgcatgtggcgcattagcgtggatctccgggatcagagggccgttcggaccttgcggtacggatgccgtggtaatgaccggcattttcgctaacgtcgccatcttcgccaacgccgcggcgcgagcgcgtaattccggcattggcatatcgcctacggtctggaaaagaccgctttgatgatcgattaaaagcatcacggaatcgttaacatcaattaccgggcgcaaaccattaaaattagcaggacttgacatcgtattctccttcatgttttcagatttggccaaaacggccggagttgaaatcgcgaactgcttctgcgatctcttgtttcgtgttcataacaaatgggccgtaacccacaatcggttcattcagtggctcgcctgataacagcaatacgctggcgtcgctgctggcctcaaggtgcagcgttttcccttgctggctcaacaccaccagttgcgcttcgttgaccggcgtcgtgccgttcaccgtgatattgcctttcagtaccaccagcgcggtgctccatccttccggctgtgccaatgtaagctggcgattgcgttgcaggcgcatatcccagacattgagcggcgagaaagtgtgcgccgggccttttgtctcttcataacgccctgcgatgacccgcacgactccggcgttatccggcaacgtaacggtcgggataacatcgtgggtaatgctttgataacccggggtggtcattttgtccttcatgggaaggttaacccacaactgcaccatttccagttcgccgccccgacgggtaaacgcgtcggaatggaactcttcatgcaaaatgcctgcgcctgcggtcatccactgaacgtcgcccgggccgataacgccgccgcgaccggtagagtcccgatgctcgacttcgccactataaacaatcgtcacggtctcgaaaccgcggtgtggatgctccccaacgccgcgtttttcattacccggcgtaaaggtgtgcggcccggcataatccagcagcaggaagggactcaactgctgcgcatgtgactgataagaaaagagtgaacgaaccggaaatccatcgccaacccagtgcgggcgaggtgcggtatagacgcctgtaatctgtttcatggtgttctcctcagtggcgttgtcttgatgtgaataagcttatattcatgacaaaaggttcggtagtggctaaaatggctcataccgttccattaataggacaatgtaatgataaaaacggatctcaatgattttgcgtggtttgtgcatgtggtcgaagagggtgggtttgccgcggcggggcgtgcgcttgatgaaccaaaatcaaaactgagccggcgtattgcgcaactggaggaacggctgggcgtgcgattgattcagcgaaccacccggcagtttaacgttaccgaagtggggcaaacattctatgagcactgtaaagcgatgctggtggaagctcaggcggcgcaggatgccattgccgcattgcaggtagagcctcgcggtatcgtgaagctgacctgcccggtgacgctgctgcatgtacacatcggcccaatgctggcgaaatttatggcgcgttatcctgatgtttcgctacagcttgaagcaaccaatcgtcgggtggacgtcgtaggggagggggtggatgtggcgattcgcgtcaggccgcgcccgtttgaggatagcgacctggtgatgcgcgtcctggctgacagagggcatcgcttgtttgccagcccggatcttatcgcacggatgggaatcccttccgcgccggcggagttgagccattggcctgggctaagtcttgcatccggcaagcatatccaccgctgggaactttacggcccgcagggcgcgcgtgcggaagtccattttaccccgcgtatgattaccaccgacatgttggcgctacgcgaggcggcgatggcgggcgtggggcttgtgcagctacctgtcttaatggtgaaagaacaactggccgccggtgaactggtcgcggtgctggaagagtgggagccccggcgggaggttattcatgctgtgttcccatcccggcgaggattattaccttccgtacgtgcgttggtcgattttttgacggaagagtatgcgcgaatggtggaagagtaacctgctcgtcattcatcaacttaatggacgcaaaaaaggccggttaaaccgaccttttatccagccgcccttcagggcgtgaggagacaattagcgactacggaagacaatgcggcctttgctcaggtcgtacggggtcagctcaacggtcactttgtcgcccgtcaggatgcggatgtagttcttacgcattttaccggagatgtgtgcagtaaccacgtgaccgttttctaactctacgcggaacatggtattaggtaacgtttcgagaacggtaccttgcatttcaatattgtcttctttggccatctaatcctctggggtatcactaccataatttgaaccggcaagataatgccgaacttcttttgataagtaaagatttgtgcgtttaaaacacagcaaaccaggtttagcacatgattccgcgacacacgacaacgccgcgttatacaccttttccctgatactaccgcctgatgtatcgacataagcgcaacatataagggaacggtgaaataaacgatgggcgttacctgacaacgggctgcgggataatgagctaaaccaattctgcggcagcaattataacaccccaataaaaaatgtgccgaaaacattcacttccggggcaaaaataatgtccgcggcacccaaaaacgggaggccagcggctgttggcgtaaggccgcgaggtgatcgaggtagtcacgacgtggaatttcaatggcgccgagcgaggcggtatgactattaagtacctgacaatcaataagtttaccgccgtgacgggtaaattcagcgcaaaaaaccagcagtgcggttttagaggcattctcctggcggctaaacatcgattcgccgcaaaacagcgccccctgcgagacgccatacatcccgccgaccagttcccgatcgcgccacacttcaatggagtgcgcgtggcccaattcatgtaatcggcgataggcttcctcaataccacgcgttatccaggtgccttcgtcacggtgattggcgcatccatcaatgacccgatcgaaagcgtaattgagcgtcacgcggtaaggggatgcgttgtgaaagcgcttcatactgcgactgaggtgaaacttttcaggccacagcacggcgcgaggatcgggcgaccaccacagaatcgggtcgcccggcgaaaaccacggaaaaatcccgtgctggtaggccattaacaaccgggcagggctgagatcgccgcccagcgccagtaaaccgttaggctcgcgtaaagcgccttccggcgaagggaaggcgatagaatgtcgggaaagctgaaccagacgcatgacggcgaaactccagtacgcaagtcggatcgttcaataatagcttacagacgttgtttaaactgataatagcgcccttgtccggctaacaattctgcatgagtgcctcgctcaatgatgtgcccgtcgtccattacgatgatttgatcaaaacgggccaggccgcgcaaacggtgagtcaccatcaggacggttttctcgcgcatcacatcggcaagtaattccagcatttcgctctcggtggtcgcatccagcccctcagtaggctcatccaacagcatcaacggggcatcgtgcaacagcgcgcgggcgatggccagacgacgaagttcgccgccggatagcagacgaccgccttcgccgagccagctattaagcccactatcttcgagcagattttcgaggccgacgcgacgcagcatgtcggaaagggcttcgtcgctggcattgggcgccgccagtaataaattatcacgcagcgtggcgctgaacaggtggacacgctgcggcaccacgctgatagtccggcgtaaggcggattcgctcagcgaggatagcggaagatcgttgagcagaatttcgccttgttgcgggtcccaggcgcgggtgagtagctgcaacagcgttgattttccgcagccggtacgccccagaatagcgacatgctcgccaggattagcctgtaatgagagggcattgagcgcattaatcggctggtcgggataacgaaacgaaacgtcccgcagggtgagtgtgaccttttccggcgcgggagtttctgcttgcggaaaggtcacctccggtttttgctccgttaattcagtgatacgaagcgcagaggcgataacctgccccagatgctggaatgcgccggtaacgggcgcaagcgcctcgaaagccgccagcgcgcagaagacaaacagcgcgatgagcgcgccgggctgcgtattgccgccaacgccgccggaggccatccacaacattaacatcaccgccagcgcaccaatcagcagcattaacgcctgcgataaggcggtgagttcagactgtcggcgttgggcctcatgccattgtaattcggtggcttccatttgcgcccgatagcgtttgctggcgccaaaaatggtgagttccgcctggccctgtaaccatgacgtgagctgctggcgatactgaccgcgtagatgcgtcagattttggccggtatttttgccggcgcgataaaacaccggcggcataataaacagcgtcaacagcataatgccgcccagcgtgatcgccagcgtcacgtcgagaacgctaagccccagggtgacaatcataatcactacaaaagcgccgaccagcggggagatgacgcgcaaatagagatggtccagcgtgtcgacgtcggcaacgatgcggttcagcagttcaccttgctgataacgcgccagactcgcgggggagagtggtagaagtttgctaaaggtataaatacgcagatgttgcagtacgcggaacgtggcgtcatgacttaccagacgttcaaaataacgaccagcggtacgggtaatggccgcgccgcgcacgccggctgccgggagcatatagttaaaactgtaaattcccgcgaagcctgcgatagcggacgcggacaggaaccagccggaaagcgtcagcagcccgatactggcaagcagtgtcaggattgccagcgcaattcccagcgttagcatccatttatggcgtttataaagcgtcagataagggagtagcgcgcgcatttaaatatcctcctgacggtgagccaataacgtcgcaaaagcgccgttggcggcgctgagttcagcataactgccttgttcgacaatcgcgccatcttgcataacccagatagcgtcccagtcggcgagatcttccaactgatgcgtcaccattaatgtggtctggcgttttgacgccgcttttaacgcctgcatgacgcgttgctcgctgtgagcgtccaggcttgccgccggttcatccagcagtagcagttgacagggattaagtagcgcacgggcgaccgctacacgctgtgcctggccgacggaaagtctgctggcatgattgccgagcggggtgtctactccctgcggcagcagcggtaaaaactcgcttacccatgcggcgtcaagcgcggcataaagttcctgctcgctggcgtccgggcgcgccagtaatacattttcgcgtagcgtcgctgcaggtaattgcgggttttgcccaacccaggagagatgctggcgccaggattccggcgagagatcgcgaagctcgacaccgttaatacgcaaagatccctgataggagagaaaaccggataatacattcaacagagagcttttaccggaaccgctgcgtcctaccaggacggcgcgttctcctgccgctaatgagaaattcagcggcccggcaagcgttttgccttctggcgaggtgataataagattgactgcgtcaatggttacaggttcgttttccgccagctcaacttcgccgcgcgccgggtgggcaaggggtgtttccagaaacgtcttcagactatccgccgcgccaaccgcctgcgccttagcatggtaaaacgtgccgaggtcgcgtaacggctggaaaaactccggcgcgaggatcaaggcgaggaacccggcggcgagcgtcacgccggtaccgtaatgaccaaagttcagttcgcccaggtaagagaagccaaaataaacggcgaccagcgcaatagaaagcgaggtgaaaaattccagcacgccggaagataaaaaggcgaggcgcagtacttccatcgtgcgctgacgaaaatcctgcgatgctgcgcgaatgctttcggtttccgcttctccacgaccgaaaattcgcagcgtttccatcccgcgcagacggtcaagaaaatggccgcttagccgggcaagcgccaggaaattgcggcggttggcgtcagccgcgcccatccccaccattgccataaataggggaatgagcggggcggtgcccagcagaatcagcgccgccgcccaatttgacgggaaaatcgccgccacgattaagagcggtacgcaaacggcaagcgccatttgcggcagatagcgcgcataatagtcatgcatatcgtcaatctgttccaataccagcgtcgcccagctaccggcgggcttgccctgaatccaggctgggccggcttgctgcagacgatccaacacctgacggcggatctcaaagcgaatatgttgtccggcatgaaaaccgacgcgctcgcgcaaccacaccacccaggcgcggaggacaaagaccagtatcagcaggataaaagggagcaacagcgcttcccgtggaatgttctccatgatcatatgttgcaggatacgcgccatgatccaggcctgagcgacaattaatacgccactcatgaaccccaacaggcgggaaatattcaaccaccgttgggagattacgctttgctgttttaaccagcgggtcagctctttttgacgggttttattcattgcacgcttagcaggtgagttattggaatttcaggcagggcaatgttacaacgacgcaaaaataaaggcgacttatagtcgccttttttacttttgttactgatttgtaaaaactatttgctcgcgtcggccagaccatcgagatagcgttcagcatccagcgccgccatacagcccgtacctgcagaggtgatcgcctgacggtaaatatgatccatgacgtcacccgccgcgaatacgccagggatgctggtttgtgtggcgttgccatgggtgccggactgaactttgatataaccattttccagctcaagctggccttcgaagagcgccgtgtttgggctatgaccgatggctacgaaaagtccggcgatgtccagcgtctcgatattatcgctctgctgcgtgtcgcgaagacgcagaccggtgacgcccatctgatcgccggtcacttcttccagcgtccggttggtgtgcagaatgatattgccattttcgactttatccatcaggcgcttaatgaggattttttcagcgcggaaaccgtcacggcgatggataaggtgcacttccgaagcgatgttggacagataaagcgcttcttcaaccgcggtgttgccgccgccgatcaccgctactttctgattgcggtagaagaaaccgtcgcaggttgcgcaggcggaaacgccgcgccctttaaaggcttcttccgatggcagccccagatagcgcgcggaagcgccggtcgcaatgatcaacgcatcacaagtgtactctgcgctgtcacctgtcagacggaacggacgattttgcagatccacgttgttgatgtgatcaaaaattatctcggtttcaaattttgccgcatgttcatgcatgcgttccatcagcagcgggccggtcaaatcgtttggatcgccgggccagttttccacttccgtcgtggtagtcagttgaccgcctttttccataccggtaataagtaccggctgtaaatttgcgcgcgcggcatacaccgccgcggtatatcccgccggtcctgagcccagaataagcagcttactgtgtttggtcgtgcccatgagatccccatagttgttggcagacaatgagcagaattgtagggaatttacagacgtaaaaaaagagcataacgattttgttaacaatatgtgtaatagcatgaaccgatgaacggccgcgacagcgacgttatcatcacaaactttaattaaaatcggtaacttataaggtgacgaaatgacagtttaccgccctctctaatgaataactggcatgttgtactaaaaatcgatgttttgctttgacaatcacctgctgttttgcgaaaacattcgaggaagaaaaaactgtgttatgtatgtgctgcataatcatgcatgtaaataccatgtttaccgggctagtgaaatctacgcatggcgtggacagacgccattcgtgatgtcgatagctgccgcgaggcaacggtcttctcaccatagaccaggcattgcgcgccgttaatccctctgggtttcggtctatcgtgatgggcagcgactctgaacagtgatgtgagtagagtcaggcaggagtagggaaggaatacagagagacaataataatggtagatagcaagaagcgccctggcaaagatctcgaccgtatcgatcgtaacattcttaatgaactgcaaaaggatgggcgtatttccaacgtcgagctttctaaacgagtaggactttcgccgacaccttgccttgagcgtgtgcgtcggctggagcgacaggggtttatccagggctatacggcgctgttgaacccgcattatctggatgcgtcacttctggtattcgttgagattaccttaaatcgcggcgcgccggatgtgtttgaacagtttaatgccgccgtgcaaaagcttgaagagattcaggagtgtcatttggtttccggcgatttcgactacctgttgaaaacccgtgtaccggatatgtcagcgtatcgaaaactattgggagagacgttgctgcgcttgccaggtgtgaacgacacccgaacttacgtagtgatggaagaggtaaaacagagtaatcgtctggttattaagacacgctaacacggaacaggtgcaaaatcgctgtagtttgattacactcctgttaatccatacagcaacagtgccggggcaacccggtgctgttgtccgttttagcatcgggcgggaaaagcctggaacctggagagccttttttgagccaggaatatactgaagacaaagacgtcacattgacgaagttaagcagcgggcgccgacttttggaagcgttgttgatacttattgccctttttgccgtctggttgatggcggccttgttgagctttaacccttcggaccccagttggtcgcaaaccgcctggcatgaacccatccataatttaggcggcgcgccgggcgcgtggctggccgatacactgttctttatttttggcgtaatggcctacaccatccctgtcattattgtcggcgggtgttggtttgcgtggcgtcatcagtctacggatgattacatcgactattttgctgtgtcgctacgccttatcggcgtgctggcgctgattctcacttcctgcggtctggcggccattaatgccgacgatatctggtatttcgcctccggcggcgtaattggcagcctgttaagcaccacgctgcagccgttgttgcatagtagcggcggaacgataatgcttctctgtatttgggctgccgggctgacgctctttaccggctggtcctgggtcagtatcgccgaaaaattaggcggctggctgcttaatatactgaccttcgccagcaaccgtacccggcgtgatgatacgtgggttgacgacgaagagtatgatgacgaatacgatgaagaaaccgacggcgtgcagcgtgaatctcgccgggcgcgtattttgcgcggcgcgttggcgcgtcgtaagcgactggctgaaaaattcagcaatccacggggccgtcagaccgatgccgcgctcttttccggcaaacggatggatgatgacgaggacattcagtatagcgcgcgcggcgtcgctgccgatcccgacgacgttctgttttcgggcaaccgtgcgacgcagccggaatatgatgaatatgatccgctgttaaacggccattctgtcaccgaaccggtcgccgccgctgcggctgcaactgccgtcacccagacgtgggcagcgtccgccgatcccataatgcaaacgccgcccatgcctggggctgagccggttgtcgcgcaaccgaccgtggagtggcagcccgtaccggggccgcaaaccggcgaaccggttatcgcgcctgcgccggaggggtatcagccgcatccgcaatatgctcaaccgcaggaggcgcaaagtgcgccgtggcagcaacctgtgcctgtcgcttccgcgccgcaatacgccgcgacgccagcgaccgcagcagaatatgactctcttgcgccgcaggaaacacagccgcaatggcagccggagccgacccatcagccgacgccggtttatcagccggagccgatagcggctgaaccttctcacatgccgccgccggttatcgaacagccggttgccaccgagcctgaacctgacacagaagagaccagacctgcccgtcctccgctttactattttgaagaggtggaagagaaacgcgcccgtgagcgcgaacaactggcggcatggtatcaaccgattccggagccggtaaaagagaacgtgccggtcaaacctacggtatctgtcgcgccgtccataccgccagtggaagcggtagccgccgccgcgtcgcttgacgcaggtattaagagtggcgccctggcagcaggcgccgcggccgctgcgcctgcatttagtctggctaccggcggcgcgccgcgtccgcaggtgaaagaggggattggtccgcaactgccgcgtccgaaccgcgttcgcgtgccgacccgacgggaactggcatcgtacggtattaagctgccgtcacagaggattgcagaagaaaaagcccgcgaggcggagcgcaatcagtacgagacgggcgcgcagctaaccgatgaagaaatagatgcaatgcatcaggacgagttagcccgtcagtttgcgcagtcgcagcagcatcgttatggtgagacgtatcagcatgatacgcaacaggcagaagatgacgataccgctgcggaagctgaattagcccgccagtttgccgcttcgcaacagcagcgctattccggcgagcaacccgctggcgcgcagccgttctcactggacgatctggatttctcgccaatgaaagtattggttgatgaaggtccgcacgaaccgctgttcacgccgggtgtcatgcccgagtcaacgcctgttcagcaaccggtagcgccgcagcctcagccacagtaccagcagccgcaacagccggtagcgccgcaaccgcagtatcagcagccgcagcagccggtagcgccgcagccgcagtatcagcagccgcaacagccggtagcgcctcagccgcagtatcagcagccgcaacagccggtagcgccgcagccgcagtatcagcagccgcaacagccggtagcgccgcagccgcagtatcagcagccgcagcagccggtagcgccgcagccacagtatcagcagccgcagcagccggtagcgccgcagccacagtatcagcagccgcaacagccgacagcgccgcaagacagcttgatccacccgctgttgatgcgtaacggcgacagccgtccattacagcgtccgacgacgccgctgccttcgttagatcttctgacaccgccgccgagcgaagttgaaccggtagatacctttgcgctggaacaaatggcgcgtctggttgaagcgcgtctggcggatttccgcattaaagctgatgtggtgaactattcgccaggcccggtcattactcgttttgaactgaatctggccccgggcgttaaagcagcgcgtatctccaacctttcccgggatctggcgcgctcattgtcaacggtagccgtacgcgttgtggaagtcattccaggcaaaccttacgtagggttggaattgccgaacaagaaacggcaaaccgtttatctgcgcgaagtgttggataacgccaaattccgcgagaatccgtcgccgcttaccgtggtgttaggtaaggatatcgcgggcgatccggtagtggcggatctggcgaaaatgcctcacctgctggtggccggtacgaccggttccggtaagtcggtcggggttaacgccatgatcctcagtatgctgtataaagcgcagccggaagacgttcgctttatcatgatcgacccgaaaatgttagaactctcggtctatgaaggtataccgcatctgctgacggaagttgttaccgacatgaaagacgcggctaacgcgttacgctggagcgtcaatgagatggagcgtcgctataagctgatgtccgcgctcggcgtgcgtaatctggctggttataacgagaaaatcgccgaagcggcccgcatgggacgtccgattccggacccgtactggaagccgggcgacagtatggatgttcagcatccggttctggaaaaactgccgtatatcgtggtactggttgatgaatttgccgacctgatgatgaccgttggtaaaaaagttgaagagctgatcgcgcgtctggcgcagaaagcgcgcgccgcggggattcacctggtactggcgacgcagcgtccgtcggtcgatgtgattactggtttaattaaagccaacattccaacccgtatcgcttttaccgtatccagcaagatcgactcccgcaccattcttgatcagggtggcgctgagtcgctgctaggtatgggggacatgctctactccggaccaaactccaccatgccggtacgtgtccatggggcgtttgtgcgtgaccaggaagtccatgcggtggttcaggactggaaagcgcgcggtcgtccgcaatatgtggatggcattacctccgacagcgaaagcgaaggtggcggtggcggttttgacggcggcgaagaattagatgcgctattcgatcaggccgttaatttcgtcactcagaagcgaaaagcgtccatttccggcgttcagcgtcagttccgcatcggctataaccgtgcggcgcgtattatcgaacagatggaagcgcagggtattgtcagcgctcaggggcataacggtaatcgtgaagtgctggctccgccgccttttgagtaaacctgtaagccggatggcgctgtgcaggctgccatccggcaacaaaattcagtattttcttctttcctcatgctgatttttggcctggaatagaaagcaaaaggagctcctggtcgggagtgtcgaaacctgaggaataatgatgaaaaaaatggcaatcgcctgtgcattactttcaagcgttgtagccagcagcgtatgggctgacgccgccagctctctgaaaagccgtctggataaagtgagcagctttcatgccacctttactcaaaaagtcaccgatggcagcggtgccgcggtgcaggagggacagggtgatttatgggttaagcggccaaatctattcaactggcatatgacgcaacctgacgagagtattctggtttctgacggcaaaacgttatggttctataacccgtttgtagaacaggctaccgccacgtggttgaaagatgccactggaaatacaccgtttatgctgattgcccgcaaccaggccagcgactggcagcagtataatattaagcaggacggcgataattttgtgctgacgccgaaagccagcaacggcaatctgaaacagttcaccatcaatgtgggacgcgacgggactatccaccagtttagcgccgtagaacaagacgatcagcgtagcgcctatcagctaaaatcccagcaaaacggcgcggttgatccgtcaaaatttacgtttactccgccgcaaggggtaacgatagacgaccaacgtaagtagaggcgatgagtgagcaatctgtcgctcgatttttctgataatacgtttcaaccgctggccgcgcgaatgcggccggaaaatttagcgcagtatatcggccagcagcatttgctggccgcaggtaagccgttgcctcgcgctattgaggccgggcatctgcactccatgattttatgggggccgccagggacggggaaaaccacgctcgctgaagtgatcgcccgctacgccagcgccgatgtcgagcgtatttccgccgtcacttctggggtaaaagagattcgcgaagctatcgagcgcgcccgccagaatcgtaatgccggtcgccgtaccatcctgtttgtcgatgaagtgcatcgctttaacaaaagccagcaggacgcctttttaccgcatatcgaagatggcactatcacctttatcggcgcgaccacggaaaatccctcttttgagctgaactcagcgctcttgtcgcgagcgcgggtctatctgctgaaatcgttgaccactgacgatattgagcaagtactggaccaggcgatgcaggacaaaacgcgtggttacggcgatcaggatatcgtgttaccggatgagacacggcgagcgattgctgagctggtcaatggcgacgcgcggcgcgccttaaatacgctggaaatgatggctgatatggcggaggcggatgacagcggcaaacgcgttttattgcccgccttgttgaccgagatcgccggcgagcgcagcgcgcgttttgataacaaaggcgatcgcttctacgatcttatttccgccttacataaatcagtgcgcggcagcgcgccggatgccgccctctattggtatgcccgtatcattactgcgggaggcgatccgctgtacgtggcgcgtcgctgcctggcgattgcctcggaagatgtgggtaatgccgatccgcgcgcgatgcaggtcgccattgccgcgtgggattgtttcacccgcgttggcccggctgaaggcgaaagggcgatcgcgcaggctatcgtttatctcgcctgcgcaccgaagagcaacgccgtctataccgcctttaaggctgcgctggccgacgcgcgcgaacgtcctgattatgacgttcctgtccatctgcgtaatgcgccaaccaaactgatgaaagagatgggctatggccaggagtaccgctatgcccacgatgagcccaatgcctatgctgcgggtgaagtgtacttcccgccggaaatcgcgcaaacgcgctattatcatccgacaaatcgtggtctggaaggcaagattggcgaaaagctcgcctggctggctgaacaggatcaaaatagccccacaaaacgctaccgctagtgtaaacgttgcggtaaggttatctctaaatatgatgctccaggtatcatggcgttgatgatgaatctcgttatgcctgatagcacgttgcttatgaggtccgcgggtatagcgcaatggatgcgttgttgctgtcgtcggtctggtaaggcgaaaacgtcgctattacgtaaacgcggtttacgttcatcaatacaatcagaggcgatcatcaattgatcgcgtttccttttattattcgataagcacaggataagcatgctcgatcccaatctgctgcgtaatgagccagacgcagtcgctgaaaaactggcacgccggggctttaagctggatgtagataagctgcgcgctcttgaagagcgtcgtaaagttttgcaggtcaacacggaaaacctgcaggcggagcgtaattctcgatcgaaatccatcggccaggcgaaagcgcgcggggaagatatcgagcctttacgcctggaagtgaataaactgggcgaagagctggatgcggcgaaagccgagctggataccttgctggcggagatccgcgatatcgcactgaccatcccaaacctgcctgcggatgaagtgccggtaggtaaagatgaaaacgacaacgttgaagtcagccgctggggtaccccgcgtgagtttgattttgaaatccgcgatcacgtcaccttaggggaaatgcactccggcctcgactttgccgccgcggttaagctgaccggctcccgttttgtggtgatgaaaggacagattgcgcgtatgcatcgcgcattgtcgcagttcatgttggatctgcatacggaacagcacggctatagcgaaaactacgtgccgtatctggttaaccacgacacgctgtatggcaccggtcaattgccgaaattcgcaggcgacttgttccatacccgtccgctggaagaagaagcagacagcagcaactatgctttgatcccgacggcggaggttccgctgaccaatctggtacgcgatgaaatcatcgacgaagatcagctgccgattaaaatgacggcgcatacgccttgtttccgttctgaagcaggttcttatggtcgtgatacccgtggcctgattcgtatgcatcagtttgacaaagttgagatggtgcagatcgttcgcccggaagattctatggctgcgttggaagagatgaccggccacgcggaaaaagtgctccagctactgggactgccgtaccgtaaaatcattctgtgcactggcgatatgggcttcggcgcctgcaaaacctatgacctcgaagtctgggttccggcgcagaatacctaccgcgagatctcttcctgctctaacgtctgggacttccaggcgcgtcgtatgcaggcacgttgtcgcagcaagtccgacaaaaagacccgtctggtccataccctgaatggttctggtctggcggtaggtcgtaccctggtggctgtgatggaaaactatcagcaggctgatggccgcattgaagtgccggaagtattacgtccgtacatgaacggactggaatatatcggctaatcctcgctttctcctcttctaaaaagcgccttcgggcgctttttttatgccagtttgataccggacaataatccctaccctattaggggtaatactgatttcgaatgaaggtcagtttttaacactatttttctactttttcgatatatatcagactttatagcgatgctatcgctatataaaattctatacatcgttttattgtttttttattgtgagcagcagagtgagcccttatgaaaactaagatccctgatgccgtgctggcagccgaggtgagccgtcgtggtttagtcaaaaccaccgcgataggcggcctggcgatggccagtagcgcatttaccctgccatttacccgcatcgctaacgccgcagaggcaataagcccggcgaaaaccggcgagaaagtcgtctggagcgcctgtacggtaaactgtggcagccgttgtccgctacgtatgcatgttgtggatggcgaaatcaaatatgtagaaacggataataccggaaacgatgattacgatggcctgcaccaggttcgcgcctgcctgcgcggtcgttctatgcgccgtcgcgtctataacccggatcggctcaagtatccgatgaagcgcgtcggcgcgcgcggcgaaggtaaatttgagcgtattagctgggacgaagcctacgatatcattgccaccaatatgcagcgtcttatcaaagagtatggcaacgagtccatttatctgaactatggcacgggaacgctgggcggcactttgacacgttcatggccgccaggaaaaacgctggtcgctcgtctgatgaactgctgcggcggttatcttaatcactacggtgattactcttccgcgcaaatcgcagcgggtctgaactacacctatggcggctgggcggatggcaatagtccgtccgacattgaaaacagtaagctggtggtattgtttggcaataaccctggcgaaacccgcatgagcgggggcggtgtaacgtattatcttgaacaggcgcggcagaaatcaaacgcgcggatgatcattatcgaccctcgttacaccgacactggcgctggtcgcgaagatgagtggattccgattcgtccaggtaccgatgcggcgctggtcaatggtctggcatatgtcttaatcaccgagaacatggtcgatcagccgttcctggataaatattgcgttggttatgacgaaaaaaccttgcctgccagcgcgccgaaaaacggtcactacaaagcctatattctgggccagggtaaagacggtatcgcgaagacgccggagtgggcggcgcaaattaccggtatcccggcggatcgcattattaagctggcgcgagaaatcggcagcgctaaacccgcctatatttgccagggatggggaccacaacgtcatgctaatggagaaatcgccacgcgcgccatctcgatgctggcgatcctgacgggtaatgttgggattaacggaggtaatagcggcgcgcgcgaagggtcttatgccctgccatttgaacgtatgcccacgttagaaaacccggttgaaaccagcatctccatgtttatgtggaccgatgccattgaacgcggcccggaaatgacggcgctgcgtgatggcgtgcgggggaaagataagctggacgtgccgatcaaaatgatctggaactatgctggcaactgtttgattaaccagcactctgagattaaccgcacccacgaaatcctgcaggatgacaagaaatgcgaaatgatcgtcgttatcgactgtcatatgacctcgtcggcaaaatacgccgatattctgttgcctgattgcactgcttctgagcagatggactttgcgctggatgcctcctgcgggaacatgtcttacgttatcttcactgaccaggcgattaaaccgcgcttcgagtgtaagacgatttatgagatgaccagcgaactggcgaaacgtcttggcgtggaacaacagtttaccgaaggacggacgcaagaagagtggatgcgtcatctgtacgaacagtcgcgtaaatccattccgaatctgcccacctttgaggagttccgtaagcaaggcatcttcaaacagcgtgaccccgaaggccaccatgtcgcctataaagacttccgcgaagatccgcaagcgaatccacttacaacgccatcgggcaagattgaaatctattcacaggcgttggcggatatcgccgccacctgggagctgccggaaggcgacgtgatcgatccattaccgatctacacgccaggttttgaaaactataacgatccgctaacggataaattcccgctgcagttgacgggtttccactataaagcgcgtgtacattccacttatggcaacgtagacgtactgaaagccgcctgtcgccaggaaatgtggattaacccaatggatgcgcagaaacgcggtatcaacaatggcgacaaagtccgcatcttcaacgatcgcggcgaagtacatatcgaggctaaagtgacgccgcgcatgatgccgggcgtggtcgccctgggagaaggcgcatggtatgacccggatgcaaaacgcgtggatcagggcggatgtattaacgtactgacgacccaacgtccttctccgctggcgaaggggaacccgtcacatacgaacctcgttcaggttgaaaaggcgtaaggagtaaccgatgacaacccagtatggattttttattgattccagccgttgcaccggttgcaaaacctgcgaactggcctgcaaggactacaaagatttgaccccggatgtcagcttccgccgcatttatgagtatgcgggcggcgactggcaggaagataacggcgtctggcaccagaacgtctttgcctactatctctccatctcctgtaaccactgcgaagacccggcctgcaccaaagtctgcccgagcggcgcgatgcacaagcgcgatgacggttttgtggtggtgaacgaagaggtctgtatcggttgccgctactgccacatggcctgcccgtacggcgcgccgcagtacaacgcggccaaaggtcatatgaccaagtgcgatggctgttatgaccgggtggcggaaggtaagaaaccgatttgcgtcgaatcctgcccgctgcgggcgctggactttggtcctatcgatgaactgcgcaaaaaacacggtgagctggctgccgtcgcgccgttgccgcgcgcgcatttcacgaagccgaatattgtgattaaacccaacgccaacagccgcccgaccggggacaccaccggttatctggccaatccgaaggaggtataagatgggaagtggatggcatgaatggccgttgatgatcttcacggtctttggtcagtgcgtggccggtggttttattgttctggctctggcgctgatgaagggcgacctgcgcgcggaaacgcagcagcgggtgatcgcctgtatgtttggtctgtgggtgctgatggggattggctttatcgcctcgatgctgcatctgggctcgccgatgcgcgcgtttaactcgcttaaccgcgtgggtgcttccgcactgagcaatgaaattgccagcggctcggtgttttttgcggtcggcgggatcggctggctgctggcggtactgaaaaagctgccgccggcactgcgcacactctggctgattatcacgatggtactgggcgtcgtcttcgtctggatgatggtacgcgtctataacagcatcgatacagtaccgacctggtatagcgtctggacgccgctgggcttcttcctgacgctctttatgggtggcccgctactgggttatctgctgctgcgcatcgcgggcgtgaacggttgggcgatgcgtttgttgcctgcggtttcggtgctggcgctggtggttattgccattatggtggccatgcagggcgcggaactggcgacgattcacagttccattcagcaggcgtctgctctggtgccggattatggttcgctgatggcctggcgtatggtgctgcttgcggcggcgttgtgctgctggattgtgccacagttaaaagggtatcaacctgcggtaccgttgctctctgtcgccttcattctgatgctggcgggggaattgattggccgcggcgtattctatgggctgcatatgaccgtgggcatggcggtagccagttaacgcgttgacgcgcattcggcctgcagaacgtgcaggccgaattcgcctttagccgccatcaatctaaggaatataaccggggcggagaaggcgcatataaatccatagagaagaaaacgaagctaaaggaaccatgaaatttttcgactgaacaaaacgccgattttgcgggttagattaataaaaacaagaggatgaatttttagcctttcaatatattcacgcgcagaataagtaaatcaaatcgatagtctcaaaacttgcggatcgcccatgcggagccgattgacaatgtttttggcgatggcatgatgcgcatgaaatttgaacttcctcacggtttttattcatgtccacctatacccgtcccgtcatgcttttgctgtgcgggctacttttgttgactctggccattgcggtactgaatacgcttgtgccgctgtggcttgctcaggcaaaccttccgacctggcaggtggggatggtcagctcgtcttattttaccggcaatctggtcgggacgttatttaccgggtatttaattaaacgcattgggtttaaccgtagctattatcttgcctcgctgatcttcgccgcgggttgtgtcggattgggggtgatggtggggttctggagctggatgagctggcgttttattgccggtatcggctgcgccatgatttgggtggttgtcgagagcgcgttgatgtgcagcggaacctcgcataatcgcgggcgcctgctggctgcctatatgatggtctattatatggggaccttccttggacaattattggtcagtaaagtatctggtgaattgctgcacgttcttccctgggtgaccggaatgattctggcgggaattctgccgctactctttacccgaattgtaaatcagcaaacgcaggcacgtcattcctcttctattagcgccatgctgaagctacgccaggcgcgtcttggcgtgaatggttgtattatttccggcattgttcttggttcattatatggcctgatgccgttatatctgaagcatcaggggatggctaacgccagcatcggtttctggatggcggtgctggtgagtgccggtattttggggcaatggccaatgggacgtctggcggacaaatttggtcgcttgctggtgttacgcgtacaggtattcgttgtcatactcggcagtattgccatgttaacccaggcggcgatggcgccagctctgtttattctgggggcggcgggttttacgctttatcccgttgcaatggcctgggcctgtgaaaaagtcgaacaccaccagcttgtggcaatgaaccaggcgctgttgttaagttatacggtagggagcctgttggggccgtcttttgctgcgatgttaatgcagaattattcagataatctgctgtttattatgatcgccagcgtatcgtttatttatctgctgatgctgttacgtaacgccggccagacgcctaatcctgtcgcccacatctgactgttctctgaatcgtatgcaggacgtgagtcttgcatactctttgtttatgttttacgtgaaataattgacctgcataattttcttgctttactgaaaaataaaatgtgccgaaggttataattttgcgctcctctattttctctcttcgtctttaccgcgcataattccccgcttcatttatagtaatagcattgtgttcacgaaggatcgcgttatgccgaatgtgcaggaaaaacagttgcgatggtacaacatcgccttgatgtcgtttattaccgtttggggattcggcaatgttgtcaataactatgctaaccaggggttagtggttgtcttctcctgggtgtttatttttgcgctctattttattccttatgccttaatcgtggggcaactgggctcaaccttcaaagagggaaaagggggcgtcagtacctggattaagcatacgatggggccggggttggcttaccttgcggcatggacttattgggtcgtgcatattccctacctggcgcaaaagccgcaggcgatactcattgcattgggatgggctttaaaaggcgacggctcgttgataaaagaatataccgtcgttgccttgcaggggctgacgctggcattgtttgttttctttatgtgggttgcttcccgggggatgaaatcgctaaaggttgttgggtctgtggccggaattgccatgtttatcatgtcaattttatatgttgtgatggcagtgaccgcgccagcaattacaaacgttgaaattgcgaccactaacatcacctggcagtcatttattcctcatatcgattttacctatatcaccaccatctctatgttggtctttgcggttggtggggcagagaagatctcgccttatgtcaaccagacgcggaatccaggaaaagaatttccgaaggggatgctctttttagccgtcatggttgcggtctgcgctatcctcggttcgttggcgatgggaatgatgtttgattcccggcatatacctgacgatttaatgaccaatgggcaatattatgcattccagaaattgggtgagtattaccatatgggtaattcattaatggttatttatgccattgccaatactctggggcaaatcgccgcgctggtgttttctattgatgcgccactgaaagttttactgggtgatgcagacactaaatatatcccgcagcgcttatgtcgtactaacgcttcaggtacgcctgttaacggttatttgctgacattagtgttggtcgctatcttgattatgttgccaacgcttggcatcggcgatatgaacaacctgtacaaatggctgcttaatctcaattcagtcgttatgccgctgcgctatctgtgggtatttgtcgcctttattgccgtcattcgactggcgcaaaagtacaaacccgaatatgtgtttattcgcaaccgggcgttggcgttaactgtgggaatatggtgttttgccttcaccgcgtttgcctgccttaccggtattttccccaaaatggaggcgttcacgccggagtggacattccagctgacgttgaacatcgtgacgccttttgtcctggtcgggttgggattaattttcccactgctggcgcgtagaaacacataacgacgctcttttccacggcgctcctgtcaggcgagcgccttttaaggttacaggtgcctgggttccaggcggagaccacggtattaacaggcgccgggggcagcaatagttgtcagaccttcaacccagcagcagataagcgactctgtatttaatacctggttagcgcaatattgttaaccatgcctgtctgatggcggggtcgggtattttagcggtaagagcgttatccagacagcaaaacggctaccgtcatgggtagccgtttaaaagcgggtaagatagcaggcgattaatacatcactttatgaccatactgctcaagaataccctttacacgctccatggtctcttttttaggcggcttcacgccatccagtttatattcttcgcccattgccacccatttatgtttgcccagctcatgatagggcaacagttcgattttttcgacattacccatatcgcgggtaaactcgcccaggcgatgcgcggaatcatcgtcgtcagaccagccgggaacgacaacgtaacggatccagaccttcacatttttctttgataaatactgcgcgaattccagcgtccggtgattagagacaccgaccagattctggtggatctcatcattcatctgcttgagatcgagcatcaccagatcggtaacgtccaacagttcatcaatcaccgggtcataacggcgcacaaagccgttggtgtcgagacaggtgtggataccttcttttttacaggcgcgaaaccagtcgcgtacaaattctgcctgcaaaatggcctcgccgccggatgccgtcacgccgccgccagaagcattcataaaatgccgataggtcaccacctctttcattaagtcttcaacggtgatttctttaccgccatgcgtatcccatgtgtcgcggttatggcaatacaggcagcgcatcaggcagccttgaaaaaaggtaataaagcggatgcctgggccatcaacggtgccacaggactcaaaggagtgaatgcgaccaataaccggctttttatcagcagttactgcaacactttcatttgtaatacaattggttaagttactcatatcgcttcggctagctctaaataacatggggtttatggacacattccgggcatgttgagcaccctggtaagggggttgcatcctgtaaaaaagcggtactgcgagcgtaaattttggactacagaatgtgtggctgttccagaatgtgctgcaatggagctattttacctctattcagtataaaatatacggcaaatctatgctgcataactcgcaccgccagaaattctggctcattcatcagctcgtaacgcctcaaccgcaatacatactgcaagtgtatcatccatagcgccctggttttactgtttatgatccgcctcttttttcgaatggttggcgccgttttgttgtggtcagaacgaaaataattctcaacataattcagatgtgtccaaagaacgttatgcgctgtccagcgcctggcgtcgcattcaacgcgcaatcaggtgtaaatctgatgtcatttctaaacccaggctgattcaatctcttaaatagagtgtggttttaatcaaaaaatgagagcaacggattggatcttgctttcgcggtaaataatcaagggagttattatgccagttacgttaagttttggtaatcgtcataactatgaaattaatcattcacggctagcccgtttgatgagtcctgataaagaagaagcgctatacatgggggtatgggatagatttaaggactgcttcagaacacacaaaaaacaagaggtgctggaggtattatatacactcatccatggatgtgaacgtgaaaatcaagctgaacttaatgttgatataaccggcatggagaagatacatgcctttacacaattaaaagaatatgctaatccatctcaacaagaccgctttgttatgcgttttgatatgaatcagacacaagttttatttgagattgatggcaaggttattgataaatgtaatttgcatcgtctcctcaatgtttcagaaaactgtatttttaaagtgatggaagaagatgaagaagagttgtttcttaaaatatgtattaagtatggagaaaaaatttctcgctatccagaattattagaaggatttgctaataaacttaaagatgcagttaatgaggatgatgacgttaaggatgaagtttataagcttatgcgatctggagaagatcgaaaaatggaatgtgttgaatggaatggtactcttactgaagaggagaagaataaactacgctgtcttcaaatggggtcttttaatattactacccaattttttaaaataggttactgggaattagagggggaagtcctgtttgatatggttcatccaacacttagctatctgctacaagcatataaaccgtcattgtcatctgatttaatagaaactaacaccatgctgttttctgatgtattaaataaggattatgatgattatcaaaataataaaagagaaattgatgctattctaagaagaatatatagatcacataataacactttatttataagtgaaaagtcgagttgtcgcaatatgcttatataaaaagtcattaaaaaggccccactgatatggagccttttttgtacgctttttatggcgtaatttcagtcaaacccattacatggtctgcgtgaaggtacgagtaataacgtcctgctgctgttctttcgtcagggagttaaaacgtactgcgtaaccagatacacggatggtcagctgcggatatttttccggatgttccatcgcgtccagcagcatttcacggttcatgacgttgacgttcaggtgctgaccgccttcgatggacgcttcgtggtggaagtaaccatccatcagacctgccaggttagtcttacgaacttcgtcgtctttacccagtgcgttcggaacgatagagaaggtataagaaataccatctttcgcgtaagcaaatggcagtttagcaacggaggtcagagaagcgacagcgcctttctggtcacgaccgtgcatcgggttagcacctggtccgaacggcgcgccagcgcgacgaccatccggggtgttaccggttttcttaccatacacaacgttagaagtaatggtcagaacagactgtgtcgggatagcgccacggtaggtggtcagtttctgaattttcttcatgaaacgttctaccaggtcaaccgccatgtcatctacacgagcgtcgttgttaccaaactgcgggtattcgccttcgatttcgaagtcgatagccagaccatcttcgtcacgaatcggtttaactttcgcatatttgatggcagacagggagtcagcagcaacggacagacctgcgataccacacgccatggtgcggataacgtcacggtcgtgcagcgccatcagagaggcttcgtagctgtacttgtcgtgcatgtagtggataacgttcagcgcggtgacatactgtttagccagccagtccatgaagtgatccatgcggtccatcacttcgtcgaagttcagaacatcgcctttgatcggttcggatttcggaccaacctgcattttcagtttttcatcaacgccgccgttgatagcgtacagcatggttttcgccaggtttgcacgcgcgccgaagaactgcatttgtttaccaacgatcatcgggcttacgcagcatgcgatagcgtagtcatcgttgttgaagtccggacgcatcaggtcatcgttctcgtactgcagagaagaagtgtcgatggagactttagcggcgaatttcttgaagttcagcggcagtttttcagaccacagaacggtgatgttcggctccggagacggccccatggtgtacagggtgttcaggaaacggaagctgtttttggtgaccagagtacggccatcaacgcccataccgccgatagattcggttgcccaaatcgggtcgccggagaacagttcatcatattcaggagtacgcaggaagcgaaccatacgcagtttcatgaccaggtggtcaatcatttcctgtgcgtcttgctcggtgattttgcctgctttcaggtcacgttcgatgtacgcatccaggaaggtggatacacgaccgaaggacattgctgcgccgttctgagatttaaccgcagccaggtaaccgaagtaagtccactggattgcttcctgagcgttagtcgccggaccagagatatcgcagccgtatttagctgccatttctttgatctgacccagagcgcggtgctgttcagcgatttcttcacgcagacggatagtcgcttccagatttacgccgttttccagatcggattgcagagacgtaaactgtgcgaatttgtctttcatcaggtagtcgataccgtacagcgctacgcgacggtagtcaccgatgatacggccacggccatacgcatccggcagaccggtcagaacgccggatttacggcaacgcaagatgtccggagtataaacgtcgaacacgccctggttgtgagtcttacggtattcggtgaagatttttttgatcattgggtccagctcgcgattgtacgctttgcaggaaccttcaaccattttgatgccgccgaacgggataatcgcacgcttcagcggagcttcagtctgcagaccaacaattttctcaagcgctttgttgatgtagccagcgtcgtgagaagtgatggtggaagcaacggaggtgtcaaagtcaacaggcgcgtgagtgcggttttcctgtttaacgccttccattacgctgtcccacagcttggtggtcgcgtcagtagcgccagccaggaaggactcgtcaccctcatacggagtgtagtttttctgaatgaagtcacggacgtttacttcattctgccagtcacctttggtaaaaccttcccaggctgtggctaacttttcattaagctcggacatgtaacacctaccttcttaagtggattttttatttactgcgtgtaatgggcatcaacagattaatgatgctcgttaccacgcaggtaaatgacccagtatgtcaacccgaccaacaaaccgccgccgataatattaccgatcgtgaccggaatcaggttatcagtgatgaagctcatcacggtcaggtgagaaaaactttccggagacgaaccaaccgcggtccaaaactccggtgtagcaaaatcgcgtattacaatacccataggaatcataaacatgtttgcgatactgtgctcaaaaccgctggcgacaaacatggcgacgggcagtaccatgatgaacgctttgtccatcaggctacgacctgagtagctcatccacacggccagacaaaccatcaggttcgccagaataccgaggcagacagcttcaataaaagtgtggtgcattttgtggtcggcggtttgcaggacgttaagtccccattgaccgttggcagtcatatactcgccggaaagccacatcagtaacacgaaaagcagagcgccaatcaggttaccaaaatagacgtttaaccagtttttagccagttgcccccaggtgatgcgaccgctagctttagctacaacgatcagaacagtagaggtgaagagatcagcgccgcaaataacacagagaatcagtcccaaagagaaacagatacccccgataagtttcgccatgccataaggcatcgcgccagtaccggttgtcgcagtaatataaaaaacaaaggcaattgaaatgaatacgccggcggtaatcgccagatagaaagtcttaagcggatgtttcgttgctttatagacgcctgcttcttcagccactttggccattgctgcagggagtaaaaggtcaaaagggttgtcagctttcacactaactctctctttattaagtcggcgacgagatactaacaaagcattatagatgagaatttgatatagatcatatctcgcctggcttataggcccgtaagtcgcatggcttttatgcaattacggtgtaactttttgattatcctaataaaaataaattttaaaaattataaatagagttgaattttttcctgactcctcctgctgcacggttaattaatatggagtaatcaacaaataaagtaacatcactatgtcaattaatttaatatcaacaaccaatatttaaccttgttattacatttttcgccgtttagcgaaaataaataaaacggggccgcaaaggcgccccgtaatataacgcagccgagagggtaaacctaccctaagtcactcatatggccttattttgaccagtatgccgctttcgcgcgctgtaatttatcatacgcttttaacaaggactgatgcgccgggaacgcttgtagatcgtggtcgacagccggtagtccataaaaagccgcttcaccgctaagcgcggcgctggcggcctctacagcctctgcgccatacatttttataaaagcattgagatattgcagtggctgacgcgcatcttcttgcgacaggagcagcagagtttgcaggcaacggtaatagtttgcgcgtgtcggactaaagaccgacgaattgaactccatcgtccattctgtccagattagcgcctgctccaaatcgccgcccgctaacgctaacattgcttttaattcgccgacgcgcagtgtataccaaccattgtccgctccggtcgccagacccaacagttcacgcacgcgggtgaaatcgtcaaaaccttcttcatccaattgttcaatcagattgagataatcttctttattccaggcgctaccgggcagcgaaagcagagtctcacgaagatggctacccatattgttgttggccagccacagatcttcggcaggataaatatcagacattcccggtacgataatacgacaggcgtatacgccgagatgctcgtaatcggcaatgtaaacttctttatcttcagcagcaaagatggccatcagcgtggcgaattcttcttcggtagtgccggaaaaactccagtccgtgaacggataatcggcgtcctgtttgaacagatcccaggaaatcaggccgctggagtcgatgaagtgggtctccagattagtgtgctccgcgacttcttcatcatcgaacgttggtggcgtgaagacatcaagatctttcagaccgcgtccctggagtagctcggtcactgtacgctccagcgcaacgccaaagtcaggatgggcgccaaaagaagcaaagcaggtaccgttagccgggttgaacagcacgacgcagataaccggatacttaccgcccagcgagccgtcataggcgaaaatcgggaaaccctcggcttccagcgtggcgattgactccattaccgccggataacgcgccatcacctctgcgggaatctccggcagactgatactttccgcaatgatgcgatttttcacataacgctcgaagacttccgacagtccctgaacgcgggcttcattacgcgtattgccggcggacattccgttagagacgtacaggttgccgatgatattcatcggaatatacacggtctggttatcggactgacgggtaaatggcaggccgcagacgccgcgagcttcattgccggactgaagatcaattaactggcttccggtgagttcattttccggatcgtaaaacgcgcgcagacgggcatcaagcaagccttccggtacgtcgtcattttcagtcagcgggaaccacttttcgttcgggtaatgcacgaatggcccattggcgaccgtttcgccaagccagaaatcagcaaagaagtagttggttgacagacgctcgaagtattcgcccagcgccgaggccagcgccgcttttttggtcgcgccttttccgttggtaaagcataacgcgcactctttatcgcgaatatgcactgaccagacgtttggcaccgggttcagccaggaggcctcttcgatgtgaaagccgaggtcgagtaacttttgctggaagcgggcgatggagtcttccagcgcggcgtctttgccgggaataaatgtttgcgtcatgaaaatcacttttgtcgtacggaaagcgcgcaatgatacgggttttatgtgacgggcgctatctcgccgggacatcggcggaaataaaagtattggctatgcttttacactggcattcacaggaagagcataaaaaatgaaagcatttgatttgcaacgaatggcgctggataacgtgccggtagcgtttttgggggaagtggcgctgcgtagcttttacacctttgttctggtgtttcttttcttaaaggtgacaggacgacgcggcgtacggcaaatgtcgctttttgaagtgctgatcattttgacattggggtcggcggcaggcgacgtcgcgttttatgatgacgttccgatgctccctgttctggtggtattcatcaccctggcgctgctctatcgcctggttatgtggctgatggcgcatagtgaaaagttggaagatctgctggaaggcaagtcggtggtcattgttgaagacggcgaactggcgtgggaaaaactgcagcgctcgaacatgacggagtttgagttttttatggagcttcgcttgaatggcgttgagcaactggggcaggtcagactggccatcctggagacaaacggacaaatcagcgtctatttctttgaaaataaagacgttaagccggggttaagcattcttcctgagcactgtacgccacgctttatcgtggcgccggaggctggcgactatgcctgcgtacgttgcagtgaagtgatacgcatgaacgccggggaaaagcaattatgtccgcgctgcgcaaatccagaatggacgaaggcaagccgggctaaacgcgttgtttaacagcgaaaatatcggatttatacggttaatccggaagattctgttgtgtgacgcatgccgcattttctcctcgcattgttttacccattgcggcgcgtgtcactgaatgataaaaccgatattcacatgaataacgtttgcctgatgtctgtcaggcaggaaacaatgcagcgtggtgaggggaaatggctcaggtctttaattttagttcaggtccggcgatgctaccggcggaagtacttaaactggcgcaacaggaactgtgtgactggcacggtcttggtacgtcggtaatggaaattagccatcgaggcaaagagtttatccaggtcgctgaagaggcggagcaggattttcgcgatctccttaatatcccctccaactataaagttttattttgtcacggcggcggtcgcgggcagtttgctggcgtgccgctcaatctgctgggcgataaaaccacggcggattatgtcgatgccggttactgggcggcgagcgccatcaaagaagccaaaaaatactgtgcgccgcagattatcgacgccaaaatcaccgtggacggcaaacgtgccgtaaaaccgatgcgcgagtggcagctttccgataatgccgcttatttgcactattgcccgaatgagaccattgacggcatcgccatcgatgaaacgccggattttggcccggaggtggtcgtcacggcggacttttcttctaccatcctgtctgcgccgctggacgtctctcgctatggcgtaatttatgctggcgcgcagaagaatatcggtccggcaggactgacgctggttatcgtccgggaggatctgttaggcaaggcgcatgagagctgcccgtccatcctcgactacaccgtcctgaatgataacgactcgatgtttaatacgccgccgactttcgcctggtatctttccggtctggtgttcaaatggttgaaagcgcagggcggcgtggcggcgatgcacaaaatcaatcagcaaaaagcggagttgctgtacggtgtgattgataacagcgatttctaccgtaacgatgtcgcacaggccaaccgttcgcggatgaatgttccgttccagttagcggacaatacgctggacaaggtctttctggaagagtctttcgccgccggtctgcacgccttaaaagggcaccgtgttgttggcggtatgcgcgcctctatctataacgccatgccgattgaaggggtaaaagcgctgaccgatttcatgatcgattttgagcgtcgccacggctaatacgtttcttttttcatccccacggccagtctgtggggtttttatttctgttttttgagagttgagtttcatggaatccctgacgttacaacccatcgcgcgggtcgatggcgccattaatttacctggctccaaaagtgtttcaaaccgtgctttgctcctggcggctttagcttgtggtaaaaccgctctgacgaatctgctggatagcgatgacgtccgccatatgctcaatgccctgagcgcgttggggatcaattacaccctttctgccgatcgcacccgctgtgatatcacgggtaatggcggcgcattacgtgcgccaggcgctctggaactgtttctcggtaatgccggaaccgcgatgcgtccgttagcggcagcgctatgtctggggcaaaatgagatagtgttaaccggcgaaccgcgtatgaaagagcgtccgataggccatctggtcgattcgctgcgtcagggcggggcgaatattgattacctggagcaggaaaactatccgcccctgcgtctgcgcggcggttttaccggcggcgacattgaggttgatggtagcgtttccagccagttcctgaccgctctgctgatgacggcgccgctggcccctaaagacacaattattcgcgttaaaggcgaactggtatcaaaaccttacatcgatatcacgctaaatttaatgaaaacctttggcgtggagatagcgaaccaccactaccaacaatttgtcgtgaagggaggtcaacagtatcactctccaggtcgctatctggtcgagggcgatgcctcgtcagcgtcctattttctcgccgctggggcgataaaaggcggcacggtaaaagtgaccggaattggccgcaaaagtatgcagggcgatattcgttttgccgatgtgctggagaaaatgggcgcgaccattacctggggcgatgattttattgcctgcacgcgcggtgaattgcacgccatagatatggatatgaaccatattccggatgcggcgatgacgattgccaccacggcgctgtttgcgaaaggaaccacgacgttgcgcaatatttataactggcgagtgaaagaaaccgatcgcctgttcgcgatggcgaccgagctacgtaaagtgggcgctgaagtcgaagaagggcacgactatattcgtatcacgccgccggcgaagctccaacacgcggatattggcacgtacaacgaccaccgtatggcgatgtgcttctcactggtcgcactgtccgatacgccagttacgatcctggaccctaaatgtaccgcaaaaacgttccctgattatttcgaacaactggcgcgaatgagtacgcctgcctaagtcttctgttgcgccagtcgacgggctggcgcgccgagtccgtattcgcactatttttataattatgactaatgctaatttgttgatgatttaacacattgatttatgtgttttttataatagttatcaacggaagattagtatgaaaaataaatcattactactggcggtggcgatttccgccacgctactggcaggatgtaaaaatggcgtgaatggcaatttaatcgccagttcaggcatgtcaacctacaaagccgccacactgtccgatgcggatgttaaggcattatctaataatgcctgtaaacaaatggacagcgagaatcaactggcaggttcgaaaagcaaatacaccaaacgtctgagcaaaatcgccaaagcgctgggtaacaacattgacggtacgccggttagctataaagtctatatgaccagcgatatcaacgcatgggcgatggcgaacggttgcgttcgcgtatactccggcctgatggatctgatgaccgataatgaaattgaaggcgtactgggccatgaactgggccatgtctctttagggcactctcgcaaggcaatgcagaccgcttatgccacgctggcggctcgcgatgcgatttccgccaccagcggcgtcgcagcgcagctttcccagtctcaattgggcgatctggcggaaggcgtcatcaattcggcgttttctcgcagtcaggagtcggatgcggatgacttctcttacgatctgctgaaaaaacgcgggattaacacccagggcttagtcacggcattcgataaattcgccacaatggacgcaggtcatgcaaaatcattgatggactcccacccggcttcagccgatcgcgcgcagcatatgcgcgacagaattgccgaagataaaaagtaaatcattgtcatctttcgggctggtttctcgccggcccgctataattgcgcaattattccgcatctgattacagacaaaactggtttttgcacgcaacgttaacggtcgcgagcgttggcgcgtataatgcgcggcgtttacgttaacggtacgcctgtttaaggagataaagatgacggcaattgccccggtaataaccattgatggcccaagcggtgcaggtaaaggcaccttgtgcaaagcaatggcggaagcattgcaatggcatctgctggattccggcgcgatataccgcgtactggcgctggcggcattgcatcaccatgtcgatctcgcctctgaagatgcgctggtgccgctggcgtcccatctggacgtgcgtttcgtctcaacggacggcaacctggaagttatcctggaaggcgaggacgttagcggcgaaatccgtacgcaggaagtcgcgaacgcggcatcccaggtggcggcattcccacgcgtgcgtgaagcgcttcttcgccgccaacgcgcattccgcgaagcgcctggtttaatcgccgatggacgcgatatggggaccgtggtcttcccggatgcgccggtaaaaattttccttgacgcctcctcggaggaacgtgcgcatcgacgtatgctacagttgcaggagaatggctttagtgttaactttgaacgccttttggccgagatcaaggaacgcgacgatcgcgatcgtcatcgtgccgttgcgccgttagttcctgctgctgatgcattagttttggattctacccgattaagcattgagcaagtgattgaaaaagcgttacaatatgcgcgccaaaaattggctctcgcttaaatgcgaccgaatttgtagtacccccgttgcaaaggattgacagcgggtatgttaaacaaccccatccggcacggagccaggtggacgttaaatatgaaacctgaagattaaacatgactgaatcttttgctcaactctttgaagaatccttaaaagaaatcgaaacccgcccgggttccatcgttcgtggtgttgttgttgctatcgacaaagacgtagtactggttgacgccggtctgaaatctgagtctgccattccggctgagcagttcaaaaacgcccagggcgaactggaaatccaggttggtgacgaagttgacgttgctctggatgcagtagaagacggcttcggtgaaactctgctctctcgtgagaaagctaaacgtcacgaagcatggatcacgctggaaaaagcttacgaagatgctgaaactgttaccggtgttatcaacggcaaagttaagggtggcttcactgttgagctgaacggtattcgcgcgttcctgccaggttctctggtagacgttcgtccggtgcgtgatactctgcacctggaaggcaaagagcttgaattcaaagtaatcaagctggaccagaaacgtaacaacgttgtggtttctcgtcgtgccgttatcgaatccgaaaacagcgcagaacgcgatcagctgctggaaaacctgcaggaaggcatggaagttaaaggtatcgttaagaacctcactgactacggtgcattcgttgatctgggcggcgttgacggcctgctgcacatcactgatatggcctggaaacgcgttaagcatccgagcgaaatcgtgaacgttggcgacgaaatcaatgtgaaagtgctgaaattcgaccgcgagcgtacccgtgtatccctgggcctgaaacagctgggcgaagatccgtgggttgctatcgctaaacgttatccggaaggtaccaaactgaccggtcgcgtgaccaacctgaccgattacggctgcttcgttgaaatcgaagaaggcgttgaaggcctggttcacgtttccgaaatggactggaccaacaaaaacatccacccgtccaaagtggttaacgttggcgacgtagtggaagtgatggttctggatatcgacgaagaacgtcgtcgtatctccctgggtctgaagcagtgcaaatctaacccgtggcagcagttcgcagaaacccacaacaagggcgaccgcgttgaaggtaaaatcaagtctatcactgacttcggtatcttcatcggcctggacggcggcatcgacggcctggttcacctgtctgacatctcctggaacgttgcaggcgaagaagcagttcgtgaatacaaaaaaggcgacgaaatcgctgcagttgttctgcaggttgacgcagaacgtgaacgtatctccctgggcgttaaacagctcgcagaagatccgttcaacaactgggttgctctgaacaagaaaggcgctatcgtaaccggtaaagtcactgcagttgacgctaaaggcgcaaccgtagaactggccgacggcgttgaaggttacctgcgtgcttctgaagcatcccgtgaccgcgttgaagatgcgactctggttctgagcgttggcgacgacgttgaagctaaattcaccggcgttgatcgtaaaaaccgcgcaatcagcctgtctgttcgtgcgaaagacgaagctgacgagaaagatgccatcgcaactgttaacaaacaggaagatgcaaacttctctaacaacgcaatggctgaagcattcaaagcagctaaaggcgagtaatcctctgaaacttcgggtcttttagtccgaagtataacgagattacttgacagattgcaggtttcggcctgtaatcaagcactaagggcggctacggccgcccttaatcaatctcacggctgcagccaatttgcctttaaggaaccggaggaatcatgaccaagtcagaattgattgaaagacttgcaacccagcaatctcacattcccgctaaggcggttgaagacgcggtaaaagagatgctggagcatatggcctcgactcttgcgcagggcgagcgtattgaaatccgcggtttcggcagtttttctttgcattaccgcgcgcctcgtaccggacgtaaccccaagaccggcgataaagtggaactggaaggaaaatacgttcctcactttaaaccgggtaaagaactgcgcgatcgcgccaatatttacggttaagttttaacgcaaaacttgaacccgaaaaaagcaccgtcagggtgcttttttcatttatacgccgtcaggcgcaaacgctattcgaccgaaaactggaaaacgtttcgcattttttgctgcgtcttacatttatcaggtaaaaaacctggaatccgcgccgtatagcacaaaatcccctccagacaatggcgtcctgaacctgcacactttcccgcacagggaggtgtctatgaagataacgacggtcagcgtatgcgtagtatgcggcatacttccactcatgatattgccagtattacctgatacgtggattctcgcggtgctgttttgtctggcatgtttgctttgcctcataccccatcactatgcgcgctacgcggcattaactttgctctttttcatgtgggggatatttgccgccaggcaggccatctgggcgggaaacgtcctgcccgccgcgacgcaggaggcgacagtcgtcattactgccaccgatcatatgaccactcattatgggcgaatcacccatttgcgcggaaagccgctctttcctgctgtagggattgtcctgcatggccagtacttacccacggaagtgtgtgccgggcaacagtgggcgatgacgctgaaggtcagagcggtacacggacagcttaacgaaggcggttttgatagccagcgttacgcgctagcgcagcaccaaccgttgaccgggcgtttcctacaggctaaagcgattaaccctgagtgtagcttgcgtgggcgctatcttgcttcgcttcgcgctacgcttgcgccttatccgtggcagcaggttattctggcgttgggaatgggggagcggggagcggtgtcgcaggaggtgaaggccgttatgcgcgatacggggactgcccatttgatggcgatttccggcctgcatatcgcttttgctgcgttattggctgccggattaatccgtggcggacaattctttttgccggtcagatggattcgttggcagacgccattgctgggcggcattctttgcgcgatatgttatgcctggcttaccggcttacaaccgcctgcgctgcgcacggtggcggcgctgagcgtctggggaggattaaaattaagcggacgacagtggagcggctggcaagtctggtgctgctgtctggccgcgattattttcgccgatcctgtggcggttatatcacaaagtctttggctgtcagcatttgcggttgccggcctgttattctggtatcagtggtttcctgcgccaaacggaaattttccacgaggcttacgctggttgcttaacctgcttcacctacaggcaggcattacacttctgcttttgcctctccaggtggcgctttttcatggcataagcgttaccgcaatgctggcgaatctttttgccgtaccctgggtcacatttgtgacggttccactcatcctggcgggaatgattctgcatttaaccgggccgttttttcttgaagagtgggtatggtacctgaccgatcgcgcgttagccgcgctattttacctgttgaatgctttaccgcagggctgggtcaatattgataaccgttggcagtggctgacgcttttaccctggttaacgcttatcgcgtggcgattaaacgtctggcgtacctggccggcggtttgtttatgcgggttattgttgatgagctggccactctggcggccgataaacgccagcggatggcaggtgcatatgctggatgtcggtcaggggctggcgatagcgatcgtcaggggcgataaagtaatactctacgataccggtcgggcatggccggagggcgacagcgggcaacaggttattattccctggttgcgctggcataatctgacgccggagggcgttattttgagtcatgagcatctggatcatcggggcgggctgcgttcgctacagcaggtctggccgtcaatgtggattcgcagcccgttaggctggcagggacatttgccctgttttcgtggcgagcagtggcaatggcaggggctaacgtttcaggcgcactggccgttacgcgaaagtgccgatcgaggaaataaccgttcttgtgtggtcaaagtggatgacggtgtacatagcatcctgctcacgggcgatatcgaagcgggcgctgaacaaaaaatgctaagtcgttactggcgacatcttgcggcgacgtttatccaggtgccgcatcatggtagtaatacgtcgtcgtcgctaccatttattcagcgcgtacatggtgaagcggcgctggcgtccgcatcgcgctataacgcatggcggctgccgtcccgcaaggtaaaacagcgctaccgacagcaggcgtatcagtggtttgatacaccccaccaggggcaaatttcgctgcggttttctccgcagggctggcgcatacaaggcttacgggatcaaattttacctcgctggtatcatcagtggtttggcgtgtccgaggataacgggtagaatatgcggctatttcaacaaatgctggttttttgaatgcataacgataaagatctctctacgtggcagaccttccgccgactgtggccaaccatagcgccttttaaagcaggtctgatcgtggcgggcatagcgttaattctcaacgcagccagcgataccttcatgctatcgctcctcaagccattactggatgatggtttcggtaaaacggatcgctcagtgttgctgtggatgccgctggtggttattgggctgatgatattacgaggcatcactagctatatctccagctactgtatttcatgggtgtcaggcaaggtggtaatgaccatgcgccgtcgcctgtttggccatatgatgggaatgcccgtcgccttctttgataaacagtctaccggtacgctgctgtcgcgtattacatacgattcagaacaggttgcctcttcttcatctggcgcgctgattaccgtggtgcgtgaaggggcatcgatcatcggattgtttatcatgatgttctattacagctggcagttgtcgatcatcctggttgttttagcgccgattgtgtcgattgcgattcgcgttgtctcaaagcggttccgcagcatcagtaaaaatatgcagaacacgatgggacaagtgactaccagcgctgaacaaatgctgaaaggacacaaagaggtactgatttttggcggtcaggaagtcgaaactaaacgctttgataaagtcagcaataagatgcgactgcaaggcatgaaaatggtctctgcctcgtcaatttccgatcctatcattcagctcattgcctcgctggcgctggcgtttgtcctctatgctgcgagcttcccaagcgtaatggatagcctgacggcagggaccatcaccgtggtgttctcctccatgatcgcgctgatgcgtccattaaaatcgctgacaaacgttaacgcgcagttccagcgtgggatggcggcttgtcaaacgttgtttgcgattctggatagcgaacaggagaaagatgaaggtaaacgtgtcattgaccgcgcgaccggcgatctcgaattccgcaatgtgacgtttacttacccgggccgtgaagtgccggcattgcgtaacatcaatttgaaaattcctgccgggaaaaccgtggcgctggtggggcgttccggatcgggtaaatcaactatcgccagtctgatcacccgtttctacgatattgatgaagggcacatcctgatggatggtcacgatctacgcgaatacactctggcctctctacgtaatcaggtggcgctggtttcgcaaaacgtgcatctgtttaacgacacggtcgccaataacattgcttatgcccggacggaagaatacagccgcgagcagattgaagaggcggcgcgcatggcctatgccatggactttatcaataagatggataatggcctggataccatcatcggcgaaaacggcgtactgctttccggcggtcagcgccagcgtatcgcgatcgcccgcgccttactgcgcgacagcccgattctgatccttgatgaagctacgtccgcgctggataccgaatctgaacgtgcgattcaggcagcgttggatgagctgcagaaaaaccgtacctctctggtgattgcgcaccgtctctccaccatcgaacaggcggatgagatcgttgtagtcgaagacggtattatcgttgagcgcggcactcatagcgagctgctggcgcaacacggcgtttacgcccagctacataagatgcaatttggccaatgattgcgcgtatctggtcgggtgaatccccgctatggcggttactgctgccgctctcctggctgtatggcctggtgagcggggcgattcgtctgagctataagcttggttttaaacgcgcctggcgagcgccggtaccggtggttgtggtagggaatcttacggctggcggtaacggtaaaacccccgtagtcatttggctggtggaaaagctgcaacagcgtggcgtgcgcgtgggggtcgtttcccgcggctacggcgggaaagctgccgcttatccgctgctcctgacgccggagacgacaaccgcagaagcgggagatgaaccggtattgatttatcaacggaccggcgcgcctgtcgcggtagcgcctgaacgcgccgcggcggtgaaagcgattctggcagcgcataatgtgcagattattatcaccgacgatgggttgcagcattaccgactcgcgcgagatattgaaattgtggtgattgacggcgtgcgccgttttggcaacggctggtggcttcctgccggtcctatgcgcgaacgcgccagtcgcctgaaaaccgtagacgccgctatcgtgaatggcggcgtcgcccgggcgggcgaaatccccatgcagctagcgcctggactggcggtgaacttacgtacgggagcgcgttgcgatgtggcgcaactgagcaatattgtggcgatggcgggcatcggtcatccgccgcgctttttcgccacgctggaagcctgtggcgcgcatccgcaaaagtgcgtcccgctggccgatcatcaaacgctcgcccctgctgacgttcaggcgttggtcggtgaagggcagaccctggtaatgacggaaaaagacgcggtgaaatgccgtgcttttgccgaagataactggtggttcttaccggttgatgcgcgtttgtccggtgagcagcctgataagttgcttcaacatatcacctcgctggttcgctagcgtcccccaatgcagcggcagtgatgaatttatggagtcatgaatgtcattgccgtacctttctctttcccaggcccgttgtcttcaccttgctgcgcaggggctattgaaaaagccgcgccgtaacgcgctgcctggcgatgttcttgccgccatctcacgcatggcgttgctgcaaattgataccatcaatgttgtcgcacgtagcccctatctggtgctgtttagccgtctcggctcgtacccgcaggcctggctggatgaggcgctgcgacgcggcgagttaatggaatactgggcgcatgaggcctgtttcttaccacgccgtgactttaaacttatccgccatcgtatgctgtcgccggaaaagatgggctggaaatatcacgcggcatggatgcatgagcacgcggaagaaatagaacagctggtgcggcatattcaggagcacggtccggtgcgttctgccgattttgaacatgcgcagaaaggtgccagcggctggtgggaatggaaaccacataaacgccaccttgagggtttatttaccgccggaaaagtcatggttgttgagcggcgtaattttcaacgtgtatatgatttaacgccccgtgtgatgccgcactgggatgatgaacgcgatggactgtcacagtcgcaggcggaaaacctgatgctggataatagcgcgcgcagtctggggattttccgtgaacagtggctggcggattactaccgcctgaaacgtcctgacctgaagggatggcgggagagccgggcggaacagcagcagattattccggtcgaggtggaaacgttggggcggatgtggcttcatgccgatcttctttcgcagctggaaccggcgctgaataacgccttaaaggcgacccatagcgcagtactgtcgcctttcgatcctgtggtatgggatcgcaagcgggcaacgcagcttttcggatttaactatcggctggaatgttatacgcctgcggcgaagcgccagtacggttattttgtgctgccgctattatacctgggccgtttagtcgggcgaatggatgccaaaatgcaccgtaaaacgggggtgcttgaggttatctcgctgtatctggaggacgatattcgccctggcgttagtctgcaaaaaggaatctggcaggcgattagcgcgtttgctgcctggcaacgggcatcgcgcgtgacgctgggacaatgtccgccaggcctgtttagcaccatgcgtcatggctgggaaatagaccctgcaccctaaccgattatgttaatattgaaggattcacaatccggtccatctggaggaactatggatcatcgtctgcttgaaatcatcgcctgcccggtatgtaacggcaaactctggtataaccaggaacagcaagaattaatttgcaaactggacaatctcgctttcccgttacgcgacggcattcctgtattgctggaaaatgaagctcgcgccctgacatctgatgagagtaaatcatgagtttcgtcgtcatcattccggcccgtttttcatctacccgactgccaggcaaaccattagtggatattaatggtaagcccatgattgttcatgtcctggagcgggcgcgcgaatctggcgcggaacgcattattgtcgcgaccgatcatgaagacgtggctcgtgcggtagaagcggctggcggcgaagtgtgcatgacgcgcgccgatcaccagtccggcaccgaacggttggcggaagtggtagagaagtgcggattcagcgacgataccgttattgtgaacgttcagggcgatgagccgatgatcccggcggttattattcgccaggtcgcggaaaatctggcgcagcgccaggttggcatggcgacgctggcggtgccgattcacagcgccgaagaagcgtttaacccgaatgcggtaaaagtcgtgctggatgctgaaggctatgcgctttacttttcccgggcgacgattccctgggatcgcgatcgctttgcaaaaagtctggaaacggtaggggatacttgccttcgtcacctgggcatttatggctatcgcgcggggtttatccgccgttacgtgagctggcaacccagcccgctggaacatattgaaatgctggagcaactccgtgtgctgtggtacggcgaaaaaattcatgtcgccgtcgccaaagcggtgcccggcacgggcgtagacaccgccgacgacctggagcgcgtgcgcgctgaaatgcgttaacatgatcctgttcatgatcgtcttagacggtcatgaacagcgcggtatgatagcgcaaagatgaatactcacgtctgctcatcagtggcggctttctcgtaccgttacgattttcctcatttttcttttcttcccttgatctgatacgggtgacatctgtccatacgacgctcattattaaagcagtagcactaatgggggtaatctggaatggaacagttgcgggccgaactcagtcatttgttgggtgaaaaacttagccgtatagagtgcgtgaatgagaaagcggattccgcattgtggtcattatatgacagccagggcattccgatgccgctgatggcgcgaagttttaccactcccggcgttgcgcagcaactggcatggaaaacctcaatgctggcgcgtagcggtacggtgaggatgccggtaatctatggcgtattgacgcatgaagagcatcctggtccggatgtgctgctgctggaacggctgcgcggtgtgccggtcgaggcgccggcgcgcactccggaacgctgggaacagctaaaagatcagattgtcgaagggctgttagcctggcatcggcaggatagccgcggttgcgttggcgccgtagaccatactcaggagaatatctggccttcctggtatcgtcagcgggtggaggtgctgtggacgacgctaaatcagttcagcaataccggcctgacgatgcaggacagacgcattctgtttcgtaccagagaatgtcttccttcgttatttgaagggtttaacgataactgcgtactggtgcatggcaacttctgcctgcgcagtatgcttaaagacgcccgtagcgatcagcttctggcgatggtcggccccgggctgatgctgtgggcgccgagagagttcgaactgtttcgcctgatggataatccattggcggagggattgctttggcattatctgcaacgcgcgccagtggcggagtccttcatctggcggcgttggctctatgtgctgtgggacgaggttgcgcaattggtcaataccggacgttttaaccgtaccaattttgatcttgcggcgaaatcattactcccctggcttgcctgatatgcctttcagccattgccaaagtcgccctaatgtttcatacccagcgcgatcgctgtgcatcagccagaccggggacggaattgcccgctcccagggattgagcggcgaatcgatcgccaactgattcgccggcgcgggaagcggattcagcccggcatgctgaaagaaaatcatcgcacgcggcaaatgcgaggcggaggttaccaacaggaaaggggcgtcgccgatggcctgcttaacggcggcggcttcttcttccgtatcttttggcttatccagcgtaataatatcgctacgcggtacgcccagtgactgcgccacccgcgcaccgacttccgccgtgcttaccgtattggtttttgctacgccgccggtaaaaatcagcctggctcccggattcgcgcgccacagccgaatgccttccgccagccgcggcaagctgttgttaattaaattagagctcggcgcccactgcgggttccaggtatagccgccgccgagaaccacaatatattccaccttttgcggaccctgccaggtagggtagcggttttctatcggacgcagcagatggtcagagacgggttgcaggcttaatagcaatagcgccagccaacctacgctgataaatacttttccggtcttctgaaagcggctaaaccagagcagcgccaggccgacgccaatcatcagcaacatcagcggaagcggcaataacataccgccaatcactttctttagcgtaaaaagcatcctttttggttccttttttaaccatatagcggaggattaacggtgatattacaccagacaggttcattctggccgcggctgtgacaaaatagcggttttatcagataacgcctgagccagcctgtggagagtccgatgcaggatcgcaattttgatgacattgctgaaaagttttcccgtaacatttacggcacgaccaaaggacaactgcggcaagccattctgtggcaagacctggatcgcgtgctggaggagattggcgggcggaaactgcgggtgctggatgccggcggcggcgaagggcaaacggcgattaagatggcggaacgcggccatcaggtgacgttatgcgatctgtctggcgaaatgatcgcccgcgcgcggcaggcggccgaggcaaaaggtgtgagcaaagacatgcattttatacaatgcccggctcaggacgtcgcttcgcatttggaaagcccggttgatctgatattgtttcatgctgtgctggagtgggtagccgatcctgtcggcgtattagaaacgctctggtcagtattgcgccctggcggcgcgctgtcgttgatgttctataacgctaacggtttgctgatgcacaatatggtggcgggtaattttgactacgtgcaggcggggatgcctaaacgcaagaagcgcacgctgtcgcctgactacccgcgcgaccccgcgcaggtgtaccagtggctggaggcgattggctggcagattaccggtaaaaccggcgtgcgtgtgtttcatgattatctgcgtgaaaaacaccagcagcgtgactgttatgagaccctggtcgaactggaaacgcgttattgccgccaggagccgtatattagccttgggcgctacattcatgtcaccgcgattaaaagcccggcgctagccgcagatgcaaggataacctatgagtgaattttcccagacagtccccgaactggttgcctgggccagaaaaaacgacttttccatctcgctgccggtagacagactttcctttctgctggcggtcgccacgttgaacggcgaacgccttgacggcgagatgagtgaaggcgagctggtggatgcattccgccatgtgagtgatgcgtttgagcaaaccagcgaaaccatcggcgtgcgcgctaataacgcgattaacgatatggtgcgtcaacgtctgctgaaccgctttaccagcgagcaggctgaaggcaatgcgatttaccgattaaccccgctcgggattggcatcaccgattactacattcgtcaacgcgaattctctacgctgcgtctttctatgcagttgtcgattgtggccggcgaattgaagcgcgcggcggatgcggcagcggaggggggcgatgagttccactggcatcgcaatgtttacgcgccattgaaatattcggtggcggagattttcgacagtatcgatctcacccagcgcatcatggatgaacagcagcagcaggtgaaagacgatatcgcacaactgctgaataaagactggcgggcggcgatttccagctgtgaactgctgctttccgaaacgtccggtacgctgcgcgagttgcaggatacgctggaggcggcgggcgataagctgcaggctaacctgctgcgcattcaggatgccacgatgacgcacgacgatctgcattttgtcgacaggctggtgtttgacttacaaagtaaactcgaccgcattatcagttggggtcagcagtctattgatttatggatcggctacgatcgtcacgtgcataaatttatccgtaccgcgatcgatatggataaaaaccgtgtcttcgcccagcggttgcgccagtccgtgcagacttattttgacgatccctgggcgctaacctatgcgaatgccgatcgtctgctggatatgcgcgatgaagagatggcgttgcgtgacgatgaagtcaccggggagttgccgccggatctggaatatgaagagtttaacgagatccgcgagcagttagcggccatcattgaagaacagctggctatctacaaaaccagacaaacgccactggatcttgggctggtggtgcgcgagtatctggcgcaatacccgcgcgcgcgtcatttcgacgtggcgcgtattgttatcgatcaagcggtacgtcttggcgtagcgcaagcagatttcaccggactgccagccaaatggcagccgattaatgattacggagccaaggtacaggcgcatgtcattgacaaatattgaacaagtgatgccggttaagctggcgcaggcgctggcgaatccgttatttccggcgctggatagcgcattacgttcgggccgccacatcgggctggacgaactggataatcatgcctttctgatggattttcaggaatacctggaagagttttacgcgcgttataacgtggagttgattcgcgcgccggaggggttcttctacctgcgtccgcgttctaccacgcttattccgcgctcggtgttatccgaactggatatgatggtcggtaaaattctctgctacctctatcttagcccggagcgtctggccaacgaagggatctttactcagcaggagttgtacgacgagctgcttacccttgcggacgaagccaaactgctaaagctggtgaataaccgctcgacgggatctgacgttgatcgtcagaaactgcaggaaaaggtgcgttcttctttaaaccgcctgcgtcgtttgggcatggtatggtttatgggccacgacagcagcaaattccgcattaccgaatcggtcttccgctttggcgcggatgtccgtgccggcgacgatcctcgcgaggcgcagcgtcgtctcatccgcgacggggaagcgatgcccattgaaaaccatctgcaacttaatgatgagaccgaagagagtcagccggacagtggagaggaagaataatgattgaacgcggtaaatttcgctcgctaacgctgattaactggaacggtttttttgcccgcacttttgacctggatgaactggtcacgacgttatccgggggcaacggcgccgggaaatccacgacgatggcggcgttcgtcacggcgctgatcccggatctcacattactgcactttcgtaacaccacggaagccggcgccaccagcggttcgcgcgataaaggtctgcacggtaagctgaaggcgggtgtctgttactccatgctcgacaccattaattcccgccatcagcgggtggtggtcggcgtgcgtctgcagcaggtcgctgggcgcgatcgcaaagtggacatcaaaccgttcgctattcaggggctgccgatgtcggtacagccgacacaactggtgacggagacattaaacgaacgtcaggcgcgcgtactgtcgcttgctgagctgaaagacaagcttgacgagatggaaggcgtgcagtttaagcagtttaactccatcaccgattatcattcgctgatgtttgacttagggattatcgcccgtcgtctgcgctccgcttccgatcgtagtaaattctatcgcttgatagaggcctcgctgtacggcgggatctccagcgccattacccggtcgctacgcgattatttattgccggaaaacagcggcgtgcgcaaggcgttccaggatatggaagcggcgctgcgcgagaaccgactcacgctggaagcgattcgtgttacccaatccgatcgcgatttgtttaagcatttgatcagcgaagccaccgattatgtggcggcggattatatgcgccacgccaatgagcgtcgggttcaccttgatcaggcgttggcgtttcgacgcgatctgtacacatcgcgcaaacagctggcggcggagcagtacaagcacgtcgatatggcccgtgagttgggcgaacataacggcgccgaaggttctcttgaggcggattaccaggcggcgagcgatcacctgaatctggtacaaaccgcgctgcgccagcaggaaaaaattgaacgctacgaagcggatcttgaagagctgcagattcgactcgaagagcaaaacgaagtggtggcggaagccgccgaaatgcaggacgaaaatgaagcgcgtgccgaagccgccgagctggaagtcgatgaactcaaaagccagcttgcggattaccagcaggcgctggatgtacagcaaacgcgcgcgattcagtataaccaggcgatatcagcgctcgcccgcgctaaagaactttgccatctgccggatctaacgccggaaagcgccgccgaatggctggatactttccaggcaaaagagcaggaagctacggaaaaactgctgtcgttggaacaaaaaatgagcgtggcgcaaaccgcgcacagtcagtttgagcaggcttatcagctggtagcggcgatcaacggcccgctggcgcgtagcgaagcctgggacgtggcgcgcgagctgttacgggacggcgtgaaccagcgtcatctggcggaacaggtacagccgttgcggatgcgcctgagcgaactggaacagcgactgcgcgagcagcaagaggcggaacgtctgctggcggagttctgtaagcgacagggcaaaaattttgatattgacgaactggaagcgttgcatcaggagctggaagcccgcatcgcgtccttgtctgagagcgtgtcgtcagccagcgaacagcgtatggccttgcgtcaggaacaggaacagctgcaatcccgtatccagcatctgatgcaacgcgctcctgtctggctggcggcgcagaatagcctgaaccagcttagcgaacagtgcggcgaggagtttacgtccagccaggaagtgaccgaatacctgcaacagctactggagcgtgagcgcgaagccattgtcgaacgcgacgaagtgggcgcgcgtaaaaatgcggttgatgaagagatcgaacgtttaagccagccgggcggcgcggaagaccagcgtttgaatgcgctggcggagcgttttggcggggtactgctgtcggaaatctacgatgatgtcagccttgaagatgcgccgtacttttccgcactgtatggtccgtcgcgccatgcgatcgtcgtaccggatttatcgcaaatagccgaacagcttgaaggtctgaccgactgcccggaagatctgtacctgatcgaaggcgatccgcagtcttttgatgacagcgtattcagcgttgacgagctggaaaaggcggtggtcgtgaaaattgccgaccgtcagtggcgttattcgcgttttccgtcgctgcctatttttggccgtgcggcgcgcgagaaccgtattgaaagtctccatgcggaacgggaagtgctttccgagcgctttgccacgctctcgtttgacgtgcagaaaacccagcgtttgcaccaggcgttcagccgttttatcggtagccacctttctgttgcctttgaggacgatccggaagcggaaattcgccgactgaacgggcgtcgcgtcgagctggagcgcgcgctggcgacgcatgaaagcgacaaccagcagcagcgccttcagtttgagcaggccaaagagggcgtttccgcgcttaaccgtttgctgccgcggctgaatttattggccgatgaaacgctggccgatcgggtcgatgaaattcaggagcggttggatgaggcgcaggaagcggcgcgatttgtgcagcaatatggaaaccagttagccaaactggagccagtagtttccgttctgcaaagcgatccggaacagtttgagcaattaaaagaagactatgcatggtcgcagcaaatgcagcgcgacgcgcgccagcaggcttttgctctggctgaagttgtcgaacgtcgggcgcatttcagctattccgactcggcggaaatgctgagcggcaacagcgatctcaacgaaaagctgcgccagcggctggagcaggcggaagccgagcgtacccgcgcccgcgaagcgctgcgcagccatgccgcgcagttaagtcagtacagccaggttctggcctcgctaaaaagctcttacgacacgaaaaaagagctgcttaacgatttgcagcgcgaattacaggatattggcgttcgcgccgacagcggggcggaagagcgcgcccgccagcgtcgcgatgaactgcacgcccagttgagcaataaccgttcgcgtcgcaatcagcttgagaaagcgctcaccttctgcgaagcggagatggagaacctgacccgtaagctgcgcaagctggagcgcgattatcatgaaatgcgcgagcaggttgtgaccgcgaaagccggctggtgcgcagtcatgcggatggtgaaagacaatggcgtggaacgccgtctgcaccgtcgtgagctggcttatctgtcggcggatgaactgcgctccatgtcggataaggcgttgggcgcgctgcgcctggccgtcgcggataacgaacatctgcgcgacgtattgcgtctgtcggaagatccgaaacgcccggaacgtaaaatccagttctttgtggccgtttaccagcatctgcgcgaacgtattcgtcaggatattattcgtaccgacgatccggttgaagccattgaacaaatggagattgaactgagccgtctgacggaagagctgacatcgcgtgagcaaaagctggcgatcagttcccgcagcgtggcaaacatcatccgcaagactatccagcgtgaacagaaccgtatccgtatgctgaaccaggggttgcaaagcgtctcttttggccaggtgaatagcgtgcggttaaacgtcaacgtgcgtgaaacgcatgccaccttgctggatgtgctttcagaacagcaggagcagcaccaggatctgtttaacagcaatcgtctgaccttctccgaagcgctggcgaaactgtaccagcgtctgaatccgcagatcgatatggggcaacgcacgccgcagaccatcggcgaggagctgctggactaccgtaactatctggaaatggaagttgaagttaaccgtgggtccgacggctggctgcgtgcggaatccggcgcgctatcaacgggggaagctatcgggaccgggatgtcaattctggtgatggtggtgcaaagctgggaagacgaagcgcgcagactgcgcgggaaagatatttcgccatgtcgcctgctgttcctcgatgaagcggcgcgtctggatgcgcgctctatcgccacgctgtttgaactatgcgaacgtttgcagatgcagctcatcatcgctgcgccggaaaacatcagtccggagaagggcacgacgtataaactggtgcgtaaagtgtttcagaatactgagcatgttcatgttgtcgggctgcgtggctttgcgccgcagcttccggaaacgcttcccggtacgcagacggaagatacgccttcagaagcgagttaaatacggcagaaacgatgacgtgcctgatggcgcctcgtttatcaggcaaggccggataagtcggttacgccgccatccggcacaacaagttctgttttatcattagcctggggcggcgaaagccgcctttttctttatctgaaaaatctctccgggtagtgcattttctttaaacttctttacattaggttaggcaaaaacgtaacgaactttatatactggagttaagcctgacgagtgagcaggctgactcgtcatactaaacaaaagcattggttgcggttgacccgcgctgcgggcagcgcagtcatgcggagtatgataacgaaaacagggggcaagggatgttgcttaataagatgtgtggtcgttgtctgtcggcaatcagtttatgcctggccgtaacattcgctccactgttcaatgcgcaggccgatgagcctgaaatgatacctggcgatagcgccgttgccgcgacggatctggctgggccgcagaagcaatcagccgcgacggcgattatggccgggattcagccgctgccggagggcgtttcagccgagaaagtccgggctgatttacagtcgcagcttccttccggctatacgccggtctatatgagccagctgacattgctgtatgccgcgcgcgacatgaagcccatgtgggataatcgcgatgcggtgaaagccttccagcaacagttggcggaggtggcgattgccggattccagccgcagtttaccgcctgggtggcattgttgaccgatcccgccgtaaacggtatggcgcgcgatgttgtgttgtcagacgccatgatgggctatctccatttcattgcgaatatccccgtcaaaggccagcgctggttatatagcaacaaaccttacgcattggcgacgccgccagtctcggtgattaaccagtggcaaatcgcgctggaagagggccagttgccgatgtttgtcgccagcctggcgccgcagcacccacagtatgcgcccatgcatgatgcgctgctgaagctggtggcggactctcgcccgtggccgcagttgaccaataccgcgacgctgcgcccggggcaatggagtaacgatgtgcctgcgctgcgcgaaatattacagcgtacggggatgctggatggcggtccaaagatagccttacccggcgataacactgctgatagcgccgtcgtcagcccctccgccgtggtcgacgaaacatcggtggcgcacgacgaaccaacggcccgccgtagtaagccggctccggcggcacgcgcctacgatcgtgaactggtcgaggcggtaaagcgttttcaggcatggcaagggctgggggcggatggcgttattggcccggcgacgcgtaactggcttaatatgacccccgcgcaacgcgcaggcgtactggcactgaatatccaacgtttacgcctgctgccagcggaactctctaccggtattatggtaaacattcccgcttattcgctggtctactatcagaatggcaaccaggtgctggcttcaagggtgatcgtcgggcgtcccgatcgtaaaacgccgatgatgagcagcgcgctgaataatgtggtggtgaacccgccgtggaacgttccgcccacgcttgcgcgtaaagacattttaccgaaggtgtggaatgacccaggctatctggagcgccatggctacaccgtgatgcgcggctggaacagcaaagaagcgatcgatccgtggcaggttgactgggccaccattacgccatcgaatcttccgttccgtttccagcaggcgccaggcgcgcacaattcgctggggcgttataaatttaatatgccgagttcagatgcgatctatctgcacgatacgcctaaccatactctctttcagcgtgacgccagggcgttaagttccggctgcgtgcgggtcaataaggcctctgagctggcgaatatgctcttgcaggatgctggctggaacgatgcgcggatctcaggcgccctgaagcaaggcgacacgcggtatgtcaatatccggcagaacattccagtaaatctttactatctgaccgcatttgtcggcgcagatggacgtatgcaatatcgtacagatatttacaattacgatctcacagcgcgatccagcgcacaaattgtgccaaaggttgaacaattaatcaggtaaatgaagaagttctggtaaatatgttgtcctaatgtttggcttcaacggggcgtttcgctgtagacccccgttgtggctgggggagggccatcttgacgcgggctttatcggcagttaaggtgcctttcgtgcgccagaagtgcatatacaacaacctttaagtcgaccgggccgttcagaagtctgtgccagccggtatcatgtctgcttaaaggtagaagtgtattaacgataacattgacctgtagacctgattatcatggacaaatttgacgctaatcgccgcaagctgctggcgcttggtggtgtcgctctcggcgccgccatcctgcccgcgccagcgtttgccacactctcgaccccacgcccgcgcattttgacgttaaacaatctccataccggagagtcaatcaaggcggagtttttcgatggaagagcctacattcaggatgaattagcaaagttaaaccattttttccgtgactatcgcgcgaataaagtccgatcaatcgatccccgcctgtttgaccaactttaccgacttcaggggctgttagggacgcgtaaacctgtgcagctcatctcaggctaccgttctcttgataccaataatgaattacgcgcccgtagcagcggcgtagcgaaaaaaagctaccatacaaaagggcaggcgatggattttcatattgaaggcgtggcgctgagcaatattcgcaaagcggcgttatctatgcgcgcaggtggtgtaggatattacccacgtagtaactttgtgcatattgataccgggccggcgcggcactggtaatcagcgaggcttaatcaaaggagcagtatgaactatcgtattattccggtcaccgcgttctcccagaactgttcattaatctggtgcgaacaaacccggctggcggcgctggtcgatccgggcggcgacgcggaaaaaattaaacaggaagtggacgccagcggcgtgacgttgatgcaaattttactcacgcatgggcatctcgatcatgtcggcgcggcgagtgaactggcgcagcattacggcgttcctgttatcggtccggaaaaagaagatgagttctggctgcaaggactgccggcgcaaagtcgcatgtttggtctggatgagtgtcagccgctgacgcctgatcgctggctgaacgacggcgatcgcgtcagcgtagggaatgtgacgttacaggtgttacattgtccgggacacacgccgggacacgtggttttctttgatgaacagtcgcaactgctgatctccggcgatgtgattttcaaaggtggcgtcgggcgcagcgattttcctcgcggcgatcacacccagttgattgacgccattaagcgtaaattattgccgcttggcgatgatgtgacctttattcctggccacggcccgctctctacgctcgggtacgagcgtctgcataatcccttcttgcaagatgagatgccggtctggtaagcagaatgaaaaagcctgcacattgcaggcttttttatcggtcacgccagtcggcagctttttacagtaccgcgacaatggcttcgcacagcggcgccatattatccggggtcatgcccgccacgttcacgcgaccagaagccacggcataaacgccgaactcttcacgcagacgcagcacctgatctttggtcagaccgctgaatgagaacatcccgttctgcttgataataaagctgaagtcacggttcgcgcctttttcctgcaaggtattcacgaacagttgacgcatacgctgaatacgctggcgcatgtccgtcagttcctgttcccagatagcgcgcagggcgtcattactcaggatagtcgcgacgatggacgcgccgtgcgctggcgggttggagtagttagcgcgaatggcggatttcatctggctaaaagcgcgatccacggtttccgcatcggcggcaacgagggtgcaggcgccgacgcgctcattatataagccgaagtttttggagtaggagctggcgacaataagctctttatgcagcgcggcaaaggcgcgcagaccttccgcatcttcttccaggccgcgggcaaagccctggtaagcgaaatcgaatagcggcagccaccctttttcaacggaaagctcagccagaacctgccactgttccagagtagggtcaatgccggttgggttatgacagcaaccgtggaacagaaccacatcgccggcctgtgcttcgctcaggctggcttgtagcgcttcaaaatccagcgtgtgattttccgcatcgtagtaagcgtactcccgaacttccaggccggcagcgttaaacacgcttttgtggttcggccagctggggttgctcacccacacccgttttaccggagtattttttgccaaaaagtcggcggcaatgcgtaacgcgccggtaccgcccggcgtttgcgccgtgcgtgcgcgcttatcgttaatcagcgcgctgcctttgccgaacagcagttcctgagtgcagcgagcaaattccggaatcccgtcaatgccgagatagtttttcgtcgtttcattttccagtaaatactgctcggcttttttaacgctggtgagcaccggtgttttgccggtttcatctttatatacgccaatgccaaggttaattttccctggacggtcatcggcgcgaaacagatcggccaggcccaaaatcgggtcggcaggagcggcggttatgttctcaaacatgacgaggttccattatagttacagaagggaaatccgctatcaggttaacggcagatttacaaaatgccaaccgttagcgctaaaaagcccgcctgtttttgaaagacgcacattttctctaagagagataaaaaaacaggaccgaagtcctgtttttgaggcataaaacaaaggggtctgctgatcagaactggtaagtaataccgacagccgcctgatcgtcggtgccaacgtagctggagctgtagtcgttttcgtccagcaggttgaaacggtagtcaacccatacgttcatgtttttgttgaagtagtaagtcgcgcccgcctgaatatatttcgccagatcggccgagccgccggcgccgttcaactgcttacctttactctgcacatacgagattgccggacgcaggccgaagtcaaactggtactgagcgaccacttccaggttctgcgttttgtttgccatttccacggtatcggtaaccgtattttcaacaatgctcatattgcgggtttcagcatatacggcagccaggtagacgttgtttgcatcatatttcgcgccaacggcccacgattctgcgcgatcgccattaccatcgcgatcctgctgatcgttagtacgcttgctgttgctgtacgctgcggtgacgccaaagccgtcgaactcatatgccatggtgtaacctacgccatcgccattctgagagttaatgctgtggttgtcctgatttttaccctgatactggataccgaaagagagaccgtccaccagaccaaagaagtcagagttacggtaggtcaacaaaccgccagcacggctggtcatgtagttatcagtataggcgccgccccaggtttcgccggagaagtagggggccatatcggtataggattcaacatcataaacgataccgtagttacgaccataatcgattgaacccacttccgcgtatttcaaacccgcgaaagccagacggaccagattcgagttctgctgttcgccttcagcgcggtctgctttagtacggtattcccactgaccgaaaccggtcagatcggtgttaatctgcgtttcccctttaaaaccaatctgggcataagtctggtcggcatttttactatcgccggtcgttgtccatacgtgacgacccacggctttaccgtacagatccagcttattaccatctttattataaatttctgctgcgtttgcggttgcagcagccagcagggcagggatcaccgctgccaggattttgcgcttcatcattatttattaccctcattggtttttttatatgacacctgccactgccgtcaataaattccgtcaataaaactttacagaaatattgatgagagtttggtgtctttatgtgtctgacaggcatctttccattcaaactaacgtttcgctaccgtgaaagtgctacaaagataaagatttggtttcaaaaggaaataatatgtaaacaaatgttatttttacggaactttgtgaacaacgtcaaacttcccctgagttatcgttttgatttgatcgtttttcttttatatccatgattttattgaatttatttgttcgcgacaccgttgtgcctgaaaaagcagctgacgagctatttcataaaaatagccatttagaagtctggatgtctgaaattgtggtgaaaaattgtgctattagagcagaaaaatctaatccgcaataaaattaaggattaatttttatgtgtaaatattttcgtgaaatatacagtaacaagatgtggtaattcagagggttgtaattaattttatttacttattgataataaaactgacattcaggcgaaaaaaaaggccagcatagctggccttgagtgtgacgtaaaaatcagaagctggcgttgcgtggggtccgtgggaacggaataacatcgcgcacgttttgcacaccagtgacgtaagcgataaggcgttcaaagcccaggccaaagccggaatgcggtacagtaccgtagcgacgcaagtcgcgataccaccagtaatcctctttattcagccccatttcggccatacgggcatccagcacatccagacgctcttcacgctgggaaccaccgatgatttcgccgattcccggcgccagcacatccatggccgccacggttttgccatcttcgttaaggcgcatgtaaaacgctttaatttctttcggatagtttttcaccactaccggcgctttgaaatgctcttccgccagataacgttcgtgttcggaagagaggtcgacgccccagaacaccgggttttcaaatgtcttaccacagcgttccagaatggcgaccgcatcggtgtaatccacctgagcgaagtcggtagagacaaaacgctccagacgagcgatagcgtctttatccacgcgttcggcaaagaacttcatgtcatccgcacgctcttccagaaccgcgttgaagacatatttcagcatggcttccgccagacgggcgttgtcttccagatcggcgaatgccacttccggctccagcatccagaactccgccaggtggcggctggtgttggaattttccgcgcggaaggtcggcccaaaagtatagattttggacagcgcgcaggcataggtttcaccgttgagctggccggagacggtcaggaatgattctttgccaaaaaagtctttgtcaaaatctactctgccctggtcgttacgcggcaggttttccagatccaacgttgagacgcggaacatttcgccagcgccttcggtatcggaagcggtaatcagcggggtagagacccaaaagaaaccctgctcatcgaagaagcgatgcagcgcctgcgccagagtatggcggacgcgcgctaccgcgccaatcaggttggtgcgcgggcgcagatgcgcgacttcacgcagatactcaatgctatggcgttttgccgccatcgggtaggtatccggatcttccacccagcctgcgacttctactttcgtggcctggatttcgaaactttgcccctgtcccggcgacgcgacaaccttacctgttactaccacggagcagcctgtcgtcaggtgtaatacttcttcattataattgggcagagaattattaatgacagcctgtacaggatcaaagcaggagccgtcataaacggcgaggaaggagatgccagcttttgaatctcggcgggtacgcacccatccgcgcacggtgacttcttggtcaacggctacgcggccctggagtacgtcggctacaggcacaacgctcataatattctctctagttaatagtcggaaaaaataaacacttgtccacccgaaatgggggtattcctatgttacctggcatctgcaatcagacaagcagaaatcgcatctggaagcaggttttcagaaagaaacctgtaaaaagttcgcacctgctcgcgaaccattgagaatttaggctggttttgcaagctttgcgcacgttactcgatcaggacgcgcatctcttgcttggcgttttgcatcacgacaatcgttttaaaagactttatattgcctgaggaaaagaaaagctcacgggtaagcgcttcatattccgccatgtcacgaacattgagcaccagtaaaaagtcgaaatcgcccgttacgtagtagacctgctgcacctgcgggcaactgacaaaccgttgacgagcctcttccagtaaattgaatcgctcgttttcgatcaccacctgcaccacaatcgtgaccgggcgtcccactttgccagcatcaataaggctgacattgcctttaattatgcccgcctcctccagtgccgcgatacgacgattcactgccgaaggtgaaagattgacctgttcggcgatttcccgctgagaaagacgattatcgcgctgcaataatgtcagaatgtttttatcccaggcgtcaagcttcatatcgcaaataacctctttaatgtgatgactatcactgtgcgcaattttgccgcgtccaggccgttaaaaaaaggtgaaaattgcacgacgatgggcattttcgcgccatttaacagcaataagcatagtactatcataatcagcggaataaagaaaaggacgtaatagatattgtgcgactcttttatcagtacgtttattaaagtgaggataaccactactacagccacaaaacgcgagttctttgcttgtttctactcaataattgacaaaaatatattatttcaataaataaactttaacaaaaggtatcattatgcatgagcttattaaatatcagtttaatacacgtcggaaaaaatatggtacaggagcggccttaagtttgcttaacggaaatgttgggcatgaggtgttagcatttcataaaaaattacccaattatgccgtcacgccgttacataatctggcgcatctaagccagcggcttggactagggtccatccatattaaagatgagtcctggcgttttggcctgaatgcttttaaaggtctgggcggctcttatgctgtaggaaaatatctcgctgataaattgcaatgtgatattaactcgttaagttttgctgcccttaatactcctgagattaaagaaaaaattaaagattgtgtttttgttaccgcgacggatggcaatcatggccgtggtgtggcgtgggcggcagagcaattaggtctaaaagccgtcgtttatatgcctaaaggatcatcgttaatccgggcagagaatattcgccatcatggagctgaatgcaccatcaccgatctgaactacgatgatgcagtgcgactggcccatagaatggcgcaaacaaaaggctgggtgcttttgcaggatacagcctggacagggtatgaagagatcccaacatggattatgcaaggctatatgacactagcggttgaagcttatgagcagctcgcagaaacaaacagtccgttgccaacccatcttattttacaagcgggggtgggatcgtttgctggcagtgttatgggttattttgttgaaaaaatgcaggaaaatatccctaatattattgtggttgagccgcatcaggccaactgtctttatcaatccgcagttatggatgatggtcaacctcactgcgtcactggcgatatggcgacgataatggccgggcttgcgtgtggggagccgaatattatcagttggcctattattcgggacaacaccagttgttttatttccgctgatgactgtctggcggctaagggtatgcgtatttctgccgcgccgcgtccaggtacggatacgccttttatttccggcgagtccggagctattggcgtagggttactttatgagttgatgaacaatatgcattatcaggatcttgctaatcgcttacagcttgatgccagtgctcatgttctgcttattagcaccgaaggtgatacgtccccagatatttatgaagatatagtctggaacggacgcagtgcttaaacattacgactaaaaaattagataataaaggtagcatgtaaaaatgcgttttttatacgcataataaacctaatgcaggaagcaagactttataacaatataccattaaaacggcatttagtgagtaagggatgctcctacccgctgactttccagtttagtgttgttggcaaaattcaggattacgctgaactggaaagattatttctgagactgaacgaattaatttaaatccgaggtcattatgttagagcaactttcacaactctttgaatttctatggggtggcccattatttttgtgtgtcatcggcattggtttttattttacagtacgcctcaattttttccagattattaatttaaaagacatttaccgtaatacaattggtacacttgccggaaaaaataaacaaaacactactggcgaggtagcgtctaaaaaatccttaaaatcaatagaggtggctgccactgtgctatccggctcattaggcgcgggaacgatcgcaggtgttgctgcggctattgcggttggcgggcctggagcaattttctggatgtggatcattgcggtcgtgggtatgatgaccaaaatggttgaagtgacgctggcggtgaaataccgaagtaaaggtgagaatggcgaatattatggcggcccaatgcattatattaagaaagggctcaataaaaaatggcatcccctggcaggattatatgcgtttgcattaatgattctggttattacggatgcctgttttgtgcaaactaatacgatggcggcggtcattcactatacgtttgacatcccaacaagcgtcatcggaggatttattgtcatcgtaggcgcgttggttattttaaaaggactctccagtcttggtaaattctgtacgattgcacttccaccgatcaccattgcctatttcattggtgccgctggtgtagtggtattgaatatcgaggctatcccacaggttataaaaagtattttctattatgcctttgcccctgcgccagcagccggtggctttgtcgggtcaaccatcatgatggccatcagtaaaggagccagtcgcggaatattcactaacgaagccggcatgggtacctcggccacagtacatgctactgccaacgtggattatgctttccgtcagggaatgtggggggcagtggaagtattttttgtctcaatgattacctgtaactttaccgcatttgctgtacttgcttctggtatgtggacagacgccagttatcaaggtattcagattatctttgccgccttaaaagaaacatggcatccgattattgttcaggttctctgtctcggtgtggcgttgattctgtttacttcttatcttggttcatatattaaatttcgcacttcgataaactatatctttggcgataagctagaacgcatcattaaatggctatattttttgccgccactgattgccgttaatatggaaatcccggtaatctggttaatggctgatattgctgtcggttttctggttatccccaacgtaattgctctgttcttgctgcgtaaagaatttattagcgaattcaatttattcagaacgcgtacacagcgggacactaattctgaaaaaacaacgcaaattacgcacgtaaatatgtcgaagagtgaagggaaagaggagtaaccatcgcggccagaacaggtaagatggtcagaagagtaacaaagcgcccactttccgggcgcttcgcacaggcatggttaacttgctttacgcacctgcgggagatcgaacgctttacgcagcgcgcgcacaaacgctttatcatgacagatcgttttaccggggctgtcggaaagtttagccaccggctttccgttacattccacgagcttaatcacgatattgagcggttttacctgagggatatcgcaggtcaggcgggtaccgatgccgaagcttaactgcacgcgagaggcgaaatggcgatagagctcgaccgcctttggcagatcaaggttatctgaaaagaccagcgtttttgtcagcggatcaatccccagcttttcataatgggcaatcgccttttcgccccatgcgacagggtctcctgagtcgtggcgtaacccctgataacggctggcgaattcaatgccgaaatcgcgtaaaaacgcatccattgtaatgcaatctgtcaaggcgataccaagctggtccggatattcgttaagccaggcggccaacgcggcacgctggctggtcgccaggtccggactgatttgttgatgcgcctggaaccattcgtgcgcctgagtgcccatcggcgtcagcgccaggcgacgcgcgagatcatagttgctggtgccgacgaaccatgactcctgctggagacgtttaactatcgcctgctgcacttcacgagagaaacggcggcgggtgccgaagtccatcaggtggaagcgggacatatcgagattggcggttaacgcagtgaaatcaaccagcttactttccagcgcgtcgagcgcctgatcaacacccgcgtttggcgagcggtagtgatgaaccagctcactgatcacggccagcagcggcacttcccacataatgacttcacgccacgggccggttaagcgaatattcagcttgccgttatcgttggtgacacagacttgagctgggttatagcgaaactcgcgtaaccagttcagataatccggtttaaaaaagggcaggccggagagccactggaactcgtcctccaggaggcgcaggtgctgcatcgcgtccacctgctcgcgaatagcatcggcataaatacccagcaggtcgtcgccacggcaacgaaactcagccgctacctgcacatcatagtagtggtgaaaaacggcttgctgcatatgcaacttataagcatctgtatccagcaacgagtgcagaacaggagaagcgaattgtgtcataggtgcgctgttgcgtcctctcacgggagcgtttagtacaataaacaactaagaaaaccgctggagtataccttgtttagcgatttattgaaccccgatcacaccataagctgtctttagggtcgagcgcatttcgtgccccatgttataaaaatgtagcgatgcgactgctaaccccttgaatttaaggatttctactgcgctgctaccatgctttggggcagtgatggggcatagcggaaaagtgcctggttgagcagagaaacctgttctgcgctcttctctgacatccactttccatacaccttgtaaaccatctgtgcatcggtatgccccatctgcgttgctataaagtttgggttagcaccagctgataatgaccagcatgcataggtatgtcgtgactgatacgcgttacggtaacgaatgccggcacgcttgattatcggggcccaaattttattaatggaattaaccgcgtagtgatatcctgtgcgaggtccacgtttgacgcattgagggctgaatacgaacgtgcagggctgaatgacagattgtccatattcccgcaacttcacttcaacctcaaactgccggccaaggcgtgtcaactgggcctgattcctcagggcatcaatagctggttgaatgagatatatcaccctgtcagtacctgcgtcggtttttggcagggtgaactcatccgtctgggtaaggttgcgcttcacaatgatcgtcccggcatgcagatcgatatcttcccaggccagaccgcacaactccccatgcctcattccggtatagactgccagtgaccagagatttctcatctgctggtgtccgcatgcctggataaacctgatgaactcgtctgtcgtgagtggatctggttcccctttcgctttcttgagacggttaattccgctaaacgggttttcctttgcatagccgttatctgttccaaactggaagatctcggccatcagcatcatgtaattattcactgtggacgatttccggcctttaacctgagtccggtgatccttcttcattacctgaaagcccgtcagcaactccttcctgacatacagcaaatcctcagtagtcaccgcagaaaccattttgttttcgccgatgagtggaagcatgttttttatgatagattcgtacctactcatggtattagagctgatctccattctcttcagctcggaccatctttcggtaagctccagcacagtaatttcctttctatcctgaccgaaccgggcaaggttcggtgagtttgggaatttttccacatagttaaaattccccatccttatcgcaaaacaaaccgaagaacgcagttcgccagctatcttgcgattttttgcagtgtcagggataccaaggttttccctgacacgtttacctttatacagaaaccagatgcggagcgaaccgccgtggttttcgacgcctgtcgggtatgatgcattagccattaatccctcctgacgtccaggagcattgacgagtgtacagcttttcatgttgtcttcgcacctggttgattttttttctgcgcctcgatccactgatcaacggcttctctgttgtatatgcattcgctcgaaggcttcggatttccgtctggtgaaatgtgcaggtactcgcggcccagcatccaggattcttttctggcgcgggtaatggttccgggcttaagcccggtaaccgcaatcagaactttttcgctaacccacttgtttggcgtcagttggataatgttgctcatcgttttctccagtggccccgcagcgggccatcgctaatattcagtttgcctgtgctggcagatttctaagtttccggacgccgatcattgcggtggctacgtagctggtggcccggttaactacttcaacaggcacctttacgccatccactacaacggtgtaattggtaacgtgcttttgtctgccgtaatcgccgaacttttcatgatgcgccgccagtgcaacatcacatgcgcgacggcccaatggcgattgcttactgcgatttataaggcgcataaaacctcctcaggcgggagggcgtaacccctcccgatgcaattagccgatgtattccggtttcatatcgtccagggtgacgcggtacttatcgtgcagttcgtcgccaagatggcgtttagcagcgccaagcgtgctttcagctttagcaaacatctctgcggcttccggttcgccagggtttggaattgagttgatcactgcctcgactttgttctgtgcatcgacctggtaatagcgcttcactgctttgttttttaattcggtgaacagcgcagtacccagcaacgctttctgtgattcgatatccgcacggattgcttttgcctgatcaacggaacttgctgtatcaatgcgttcgcgaagatcgtcggcaacagcatcaacgttagctgccgactcctgcgcgctggtcctggtgctaacctcgctggtgatttcctgtacgctcatgcgctggactggagcagggttaatctcgcgttcttctcgttgctcaacctcatcagggctgtacacgccgaggatcacttccgggcagtacaggcgagcccaatatttaacgcccagataggcaatttgctgtttagggtttgaaacccatagcggagaattgcgggtaacaacgccggagaggtaaagaggttctccccaggtgatttcagattcacctcgcagaatggcaccaacctgaacgaacaggccgatctcgtcctcatctgtccagccacgaacgcgctcagtgacggtgtacttcccatttttaccgtttttatcgcgtgtgatttcctgtgtcctggtgcagcgctcccagtcacccccatagcggtaatgaaaacggccatgaatggcactggagcttgcgattactgcgttgaccagttgtgcctcgtaaccaagaacaccgttaaccaggtgtgttttctgagccacagcgtaagggttcatgccccattgcatagcctgcatgacgatagccatacagtcggctggtttccctgcaaggtgtgccggtaccgtcacctgtgagtctgccatcaggttagcgaaagctgttaactgacccagtgcctgaacgttaaaaattgcgttactggcagaaatggtgtttggtgcctgctgctcagtggtaacaatatttgtgttttccatgattttccccttatgcctgtacgcgcaacgcttcaaggcggcgcacatcaaaatcgttcagttcgtcggtgtagtcttctgtgataggcgctgaccattcaccagtgtcgaagccgtttgctatctctcgcattgttttgcggtattccagcatgccaagttccagcaactcggtagacgcctcaatgatggcgacccagtggtagttctcgtctttgttgacgaaaatccagaaaaactggtccagcgccgcagtttcgcagtacatggccgcgctcaggtgatagtcccgatcgatgatttcccggtgcaacttcgcacgcaggccttcctgcttgatgttccacatgctgatagttttcaggtcggcgccaatgcgcaggccgcccatatcgagctcaaggtcagggcgtacccgaacttccaacccggtttcctcatcaatcccaaaatagctaacctcgacagcgcggcttgggtgagtcagcaatttgccggcggtcgggtgctccagcagggctttctgaatgttcagcgcggtgctgagctgttggcgggtgaccagcactttcccttcggtgttctcccgccacgcatccagcaattcgtcggcgaataccactgccgggttgactgatttcacggcctgaatcagatcggccttcgtgccagagactttcaacggcgacgatttttgcgcttcctgagcgaccaggtcagggttgattattgccagttgctccagcagcgcgtcacggctgccgctggttttaaccggcgcgggcagggtgacgttgtactctttgatgcaggctttcatcgccgtggctgtatgtttggtgccgttttcaatgcgctggaattcttcgggaagctgctcatacgatgcataggtttcatctaccgaagctccaagcggcatctgcgacggcagggtggcgttgtactcttccagcagcgctttgatatcgtcagcactcagcagcgctggcaggctggcgttgtgcgcgtcgatgaactcgcgcagggtggcggtggtggtgaaagcaccctcagggatctccggctctacgctgaactccgcttcgaggttttccggctgtagagccagaacatgtaccaggttgcccatatcaagcactggagagcgctctttgacgatagttttctctacgtgacgcgcgttaaagtacatcagcgacacgcgagcatctttcacctgagttgagctgatcccattggcggcgtggtaaacttcgtttggtacaccttcatagcggcccggctcgaagtattccggccaggctgcttctggctcttcttgttgcgattccggtacgttttgttgcgcctcagcctgattctggttctctacggtaactgcttctttaccagtacccagatcgtcttcgcctgcctgcaccgcatcaccagcctgtttttcatcactgtcagctttttgaacctgcacattgctggtggtctccggattcgtttctgtgccatgagttgatgagttctgcattaaagcggacacgtcgaaaataccgttgccaacatttttaaccagttcaggttcggtggtcggctggcttgtcccggttttcacccattttgggtcgttcgggtcgctgatgccttccacatattcaccgcgcgcggcggcaagctgtcggttggcttcttctaccgcgtctttttccggagtgtgtcgggcagccgtgagagcttcctcggtggggttctcgtgatcagtctccgttaagttggcgttgatatacccctgaaggcgtccggggtagtgataaaactcagggtgtgcgcttcggatcagcgcgaaaatagcggcgcgggaataatccaggataccgggcgttgcgcgaagtgctgcggaccattctttgaacggactttcctttttctttacgatttcttttgcgcgacggtaaacgctgccaggtagctcatagatattaaagtccataggcaaagtggccattgcaatctctacgtccagagtatcgagagtgtgttcgtaatcagggttacggtcagtcttattgccaccgccagcgttggcgccgctttcagtgcgttgaatagccgatacacggttgcctttcgcccactccttaacgagcaaaccgcgatcgatatgctccgtctcgaaccatgttttaaggaactggataacagtcgccagttcaggagtttttccatcgacagggaatacttttttaacggcattcactattttgtgaatgtcatgttcaatggctttcttgaacgcttcaacattctcggcggcaagcagcaggttctggacatatgaattatcggtgtccatttcgagacgcagaatttcttttttctgggaggcgtcgacgtgataaagatactcaccttcacctatgtactgagcaagaacgcggtgacggagaggcatagttgcgacaacagtcagctcgggggctggggctgttgcctgggcagggctgttgctttcgttaccaaaattttcggtgtggtcttccagcacttcgcctgtttcggtatcaacaccatcgacgatatgctggcgcgccgcggcggcggcttcagatgatggcagggtgacgccggggatttgcgtccaggtcatattgtctttagcgagttgatagtaatcgcagaaagtgaggctcagttcgccttccggcggcagctcgttaacgacagggaaattagtagcgacagctttgaaataatctttcagcttcgcaccggatttaatcagaagataatccagtgttgcatttgccgcttcaaaatcatcactgcaccagagtacagcgtctttctggcctgatgatttctttgctttgcggactaaaaatacaggattagttccactcattgttttgtcctcaattcgtgtagaatggaggtgccttaacagcaccccgatatatctggttgttaggtccggttcgctttggtcggttggaccggacagggcacgcccgcttcggtgggcgttttcttaatggatggtctgataaaatttttctgagtaatcaagcttgtaacttcggtaattaccaaaccctgcttgttctccatcacttaccttgactgtgagcagcgaaatggcttttacagcacaatgaggactgtcgaactttccgagtacatatccaccgtcgagattttcgcaattgaataaagcaatgctcttattaactgctttcaggttcatttcgatttttacgatttccataatttctccagtcttaaattcagggtgtatgaagccacgccaaattaatggcgaatttttcatttcatatttcggatctactatttaactttcgtgcgccatctggtcgtattcagcacactgcctggaacaatattccttttctttgctcgccagttgcgagccgttgcgatagagaagtgtgttttttacttctttgccttcatcaatggatttgcggcagtaaccgcattgtttaagcatccggatctcctttctgcgccagcaggtagcagaggcggcggattaaaacctcaatccggttgagcgggacagcctgctgtcgagctggtctacgtgcgaaatcaatcattctcaccctcgtttgccttatcgccggccagcggaacgttttacacctgacaacgatgcgcttgttgtcgatgaaactaacgataaaaccaaaggttcgatttgtaaagcaaaaagtgcaactaaaagttctatcttggagcataaaaatagcacctaaagaggtgctacctgtatggatgagttctttggttctattttttgaggtcgttaattagatcaaaaacgttgttcttcagcagatccatctcttggaggactgcttttgtatggaggataacacgcagtttctctgcttccgggagttgattgaaaagagaaagcaatgtttcttctttttcatcaaggactctgggtttaggttcagccctttcgccttcactttcatcccctggctccatgaagaaccaatattcaggccttccggtcaccgccgataaccttttcaagcgctctccgctggctacagacgtgccagaggcccactttctcacagatgtgtgagaaagcattacgcgccgtgagaggtcagccatagaccagccgttctcatccagaacttgctggatacgcttggcgaaaatgggatgaagatttttgttcatattcacattttacaaccttcagtttctttattcattggaactattagattgatttttgttggaacctaaagttttacgtgataatctccagctaccaactcgtagaactggagagccaaatggacaaccaattaaaaatcaaaatcagtaaccacatgactcaaatgagcatcggcgaacattttggtatctcgtctcaagctgtaggcaagtggctgagaaaaggagtaattcctccccgtcgcatcctgccgttatgtgaaattcttgaatggaaagtcactcctcacgagattgacccagcagcatacccaaacccaaccgatggcttaccaagccaagaggcatcagccaaataaccatagaggatatttacccatggagaacgcaattgcacgaaagttagacccaccagaaatcaacccgattgagatagagagcgtcctgctcaaccggcttgcatcagtagggcagaaatcatacgccgagcatatgggcatcagcgagtcgacagtcagcaggcgtaaagctgagggatatttctgcaacatggcgaaagagctggcttttcttgggattcaggccgcgccaccggaagcggtactggtatccagaaactatctcacagcagtagagattctcgctgatgccgggctaaaggctgaacgagccaggccggatgcgctggggtgggactgaaaatggcagcaactaaaaaggcgaaagccgcggtgaggggtcaccaacggctttctggtgcaaaaacggtaggtaattgcggagatgagtatgtcaaataccgctgaaatatacaaattccctgcgccgataccgacgcaacaggagtgccgtatggctgatctggaaaatggctatttacgtttagctaatcagatccaggacgccttgtgtatcgttgaactatcggggcgtgagttccgtgttttgaatgcgattatccggctgacttatggctggtcgaaaaaatcagatcgtattgccaacagcctcattgcagataagacaacactgaaggtaaagcatgtatccgaagcggtgctgagtcttgcctatcgtaacatcattatcctgcgccgtattggtcaaacaagatacatagggattaatacaaacctggataaatgggcttattccaagccacattgctcaaaatgtccggtgtcttttcctgatgatgaaattgccacatggattatttctgtacctgaaaccagggatagttatccccgaaaagggggaagggcatccccgaaaacggggatagttatccctgaaaacagggatagcgttttaccccattcagccatccctgaaaacggggatagttatccccgaaaagagggaagggcatccccgaaaacagggaacaccaaagacattattccaaagacaaatataaaagatctaaccccctttaatccccctaagggaaaagtgaagtttgatccgttgagtattcctgttcccgaatggctgaatgctgcgtcgtggaacgaatgggtcacataccgccagcaatccggaaagcccataaaaaccgaactgacggtaacaaaagctttcaggcttctgaaggagtgcctggatgaaggccacgatccggtaaacgtcatcaacacaagcattgccaacggctaccagggactattcaaaccgaagttcgctctcaacgaccgaagagctggcagagatgtgaaccacatttctgcgccagacaaaaccattcctaccggattcagggggtaacgatgaaaaacgtaatcggtactggcagtgcgcttgatcgcctgaaaagaattatcccagccagtgtgcagccgaaattctcgactgctgatgagtggcgggcatggcaggaagccgaagggcgtaaacgcagtgaagagcttgacaggatgaatcagaaatcccgcaccgagaagattttcgggcgatctggcattcaggatctccatcgtagctgtacgtttgctaactacgaagtaagcggggaggggcagcgaaaagcgtacacgatggcaaaaagttatgcccagaacttcggtagtggatttgcgagctttgtgttcagcggtggtccgggaaccgggaaaaaccatcttgcggcggcaatcggaaatcatctgctggccggcggtcatagcgttctggtggtaactattcctgacctgatgctcagggttcgtgagtgctacgacggtgggcaatcagaagcgtccctgcttgatgacctttgtaaagttgacctgctggtactggatgaagtcggtattcagcgcggaagcagtggtgagaaggtcattctcaatcaggttatcgatcgccgtctctcatcgatgcgacctgttggcgttctgacgaatcttaaccacgaggggctgttggattcactgggcgcgagggttatcgatcgcctccagatggacggagggatgtgggtgaattttgactgggaaagctaccggaaaaacgttagccacctccggattgtgaaataaggggttaaaaatggcccgacctaaaacacaaagcgaacggatgattattcttgagcggattatcggtctggtgaaagagcaggggcgcatcacgacgaacgacgtcgttgcgatttttggcgtgcaccgaaccacggcggagaaatatctgcgtatcgcgctggagcgaggcggcttcattcgtcatggccgctgcggcattttccgagaccagcgtgcggtgattgattatgacctcaggcgatacagcagtagtcaggtaacgggattttcagcgctgccggtgctggagaaaagcccggtaatgcaggtttatggagcatccaaaatgagcatcaacaaggggggagcccaatgagcaacatcgacaaacgggcgcttcgtgaagtggctgagagggctacgccggggaattggcgccgcacctcatcactgttcaatggcatcacggtaacgccattttctctttgcggtgaagaagtgacgttggcccatactgttgagaaacgtgacgcggaatttattgccgccgctaaccccgccaccgtgctggcgctgcttgacgtgctctatgagtttggagaggatgaggtggccatctctgaatacgtcacaaatcttgaagatgctttgcgagttgcggcagcacctcagcaggaggaatgatagctggttaaatccacagcagaaagcaaaagcattattaggtacaatcacactaactttttgttgttaattatttgatgaattacgaggataagctcatgtatcagcgaatgatttttgaagaaggaaaagagccaaggttgtattcaagccaacatgactccaagtttatcccaataagtaataacaatggaaaagttcaaaaggttcctgttatggagctcaaggataccagaggagatgttttttatgcttacaactatgcttattctggtaaaaaaccatcaaatgacgaaatctataaggctattgatgagctaaagccaatcggtgaaaaattcgaaatgtctaagactataagcgattagataaatctgttttcaacattgcagcaaaatcacaggaagatcgagacaaagttagcatggcgatatatggaaatgtcggagcagaacaccaagaagtaagcgtaatttgaatgaatgtgaacccgccgagtacgggttttcttttatctgaacccgctgcggcgggttttttgcctaaaatgtgatatgaaacaacacactagcctttgcaaaaagtgctattcaccccttgaatattctttctaacaggtatactgtgtttatatacagtggttgaatgtagagggaattatgagaattgaacttgttatcagccgggcaaaacagcttccggaaggtgccgttcctgcgcttgaaaaagaattaattacccgtctccagaatcagtatgaaaactgcaacttaaccatccgtcgaggcagtcaggatggtctgagtatcgtcggtgctgctgatggcgataaaaaacgtatacagagcattctgcaggaaacgtgggaaagcgctgacgactggttttattaacattgcgcttaatgctggcgcgcatttttcagaatatcgcaatttgcgtatccctttgatgctgctgccgacaatttttaaccgcgtccgtgtgtcgctcaggggggttacgtggcagagggagtcctatcagatcttgctgataatttgcgggtgactataactgatgctaagggaatagaacttttgtcttttagacttgcatcaggtgatcgctatatcctatcaacccaaaacggttctgtaacaaaccgaaagctatcaagagatgatttgtactggtctaaggataccattatggaagttgtcagagagatgggctctaataattgacttaacaataagcacgcaatcataattatcgcactggcctgaacaaccagtaacctgacaattatgcgccacggagaataccatggcgcacgaattacaactcatcaagcagtcatctggaattctgatccccgctacgccggagaccagcgaaattctgcagtcaaaaattaaactcggtgccgtgctggtggctgagttccgtcaggttaggaatcctgcattccatcgccgctttttcgcgttgcttaatcttgggtttgaatactgggaacccaccggcggcaccatttctgccaatgaacgcaaactggtaaacggttatgcaaagtttctcgctgcatatggcgggaatgagagcgcattactggatgcggctgaacagtatctggaacagattgcaaaccgccgggtaacaaacggaattagcctctgtaaatctttcgatgcataccgcgcatgggtgacggttgaggctggccactatgacgccatccagttaccggacggcacccttcgcaaacatccccgcagcatcgctttttccagcatggatgaggtcgaatttcagcagttgtataaatccgcgcttgatgtgctctggcggtggattttatcacgtacatttcgtactcagcgcgaggcggagaacgccgccgcccagctaatgagctttgcggggtgatggcgatgaaatactcctggttccatcatcacgactgcacaaccgagcaggccgacacgctgatatcggattatcagaagcggggcgtaaggacagaaaagagcctgaaccctgacttcattacctggactgtcagcgcgaaattacctgaatatgcacaccgggtgcggacgccaaaatccttacgccaaaaggtctgggggtgaacatggctaaattaccgcgccgtaagtgcgcaaacaaagaatgccgccagtggtttcacccgatacgcgaggggcagatcgtttgctcgtaccagtgcgccagcgccgtcggcaaagaacagaccagaaaagctcgcgaagccgcgcaacgtaaggcgcaatcccttcagcgcgccgctgagaaaaaagaacgcgccgcctggcgccagcggaaagccgcggttaagccgctgaaacactggattgacttgacgcagcgcgccgtaaatgacatttgccgcgaaaccgaactggcagaaggactcggttgcatctcctgtggaacgaagacggcattcgcatggcatgcaggccattacaggagtacggccgccgccgggcatctgcgcttcactcgcttcaacatccatcttcagtgtgatgtctacaacgtctacaaatcagggaacatcgaagcatatcgtgccgcgctggttgagcgttacggggaggcggcggtgctggcactcgagaacaataacaccccgcaccgctggacggtcgaggagctgaaggaaatcaggctcgcggcactggcggatctgcgtgcgctaaaaaagctggaggccgcatgaaaccagaactgatcgagatactccgcatgcgctggttgcgtctccgaatttatcgataccggggatcttttcctgtggcatatcgcattcttcgtaattacgtccgcattgaagcaaaacgggagcatcgaaatgaatcttgagtccttaccgaaatatttttcacctaaatccatgatgcccggcgcagtaccatgcggaataacgtctgatacgctgactattactgacgtaatggcatctctcgggctacttactgcaaaagccgcagtgggtattgaattgtatctggcaaaagccggggttttatcttctgaaaatatcatcgcctacatcaggcaattagcagagcagcgtgcagaacggcatggggcattacggaaaatggaaaagggtaagcgctcaaaatttctcgacactatggcgcgttatgtatttcgcgattattccctcagtgcggccagcttggtgacgtgcagtagctgtcatggtgctaaattaattgatgctgaggttttcacgaacaaggttacttacccggatggtaagccaccaaaatgggtaaaagatacgaaaggtatttctccgtccgactgggaggtgtggaaatcagttcgtgagcaggtgcgcgtagtgtgtaaggcgtgtgatggcaaaggccatgtgaaaaatgaatgtcgttgccggggacgcggagaaattctcgataagaaaaaatctgagttgcagggcgtgccggtttataaaaaatgcccaagatgcaagggaagaggctacccacgtctcaaagataccgagatttttaaagcactaggagtaacggaaatggtatggcggtacaactataaactgtttttcgatcggctggtggagcattgccatattgaggaatcgtatgcagaaaaggttctgggaaacgtgactcgatgaccaaaataatttagctattgcaaaattaacggaaaatggctaatctgattccaacgatgggttattatgcctgtgacgttacaagaattaagaacctcgcctcggcggggtttttgttttttttggtggtatattcccttggtgtcaaatcacagggggggcgatatggggttctattacgtttttcaatacaagccgaaagggatgtcgtcgggtaagcatttaaatgtttccgaggagttttcggaccggaatgaggcaaagagagcgaagtccaggcacatgattaatgatccagattgtgtcttctcgggaatcgtgcaggctgattcgccggcagcggtacttcaagaagtacaggctgaatctcttaataggctttaacggatttaacttggcagtatccacattaccaatttcattaggtcgcttcggcggcctttttctttttcaggcaccgggcatcatccgctacgtgcttggttgataaatccagcccgtgaagcctgcccctttcatcacacactgcgccatccgagctatcggaggtgaggcttatgaaaatgcacaacgatccccattcaatggactcacaatctatttttgctggctcacaattactgccaatggaaaaaacttctcatttggctctgagcgtcggatttcgctctcacttagcgtgagtccacgtccgatttcagttgcagttattgtgagccaaaatttgcgctgattgcgagtctgacttttttcgattgtgagtcgttacagatagccgccgggccagacaccacaacggtaccaggtggcgttatgtgctagaaaccgaaattcttgaacatctcattactactcatatcgttggctggcgcacggttcatcgactccatctgcttaatcaaccctatgctagcaccaacaggccccccgacgctgaaaccgacgctgctggagcgggttttgctggtgctactgctgtgggtttgactacgggtgttacagttgctttggtgtgtccgtgtgagaccattttcgttgagctggctatcttcactttgggtgcagtttccctgtgactggctgtgactgtctcctgtggtgtggttgcggctatccgtgtgccactcgctatagcctcccgccggcgcaatgattccgaccgatgtaccgtgggtggcatagggaggcatgaccatgccactacagccaccgagcagtaacgcggtgccgacgataaaaatgaacttacccagagcggtgtttttcattagttcctacctatttcttctcgttggttatttctatgccctgccttggcagggctcgctattattcattcttcaactgtgagatcaagttattttaattaaatcggtattattcttaattgtgttctttatgaataaatatcctccggctatgccggaggatatttattatttcctctcataactgagaggccccacacaaccagagggggatgaatgtccgaatcgatttctggtactgggttagcaggtggcatcctgacaggagccagtgtctatggactgctgacctgtattagctcagacctgaactggttactgtgttgtagcatcgtgggattttgcattttttgatgagtgtcaattactaaattcgtaggcgattcttggtggtgatgtgtgacccatctcttttaaaatgatattggtatactcgactaccgggcctcttggattactgtcttctttgtcctgaaggtgagtcaacgcgtgtacaacttcatgaataaatgagcgtgttgtatcaaattgttgtgggccatcattactttcatagtactctggtattgaatcatcgtctgtatcatccaggttgagggcaatcacttttctgccttctgaactctccaggtcctcatcagttacggtagtaccaaagttttctccggctcccagcaaccagcgttgttctacatcatgcaattcctggtcgtaggcataattcatcagtctgcggaatgtcccgctttgagtgtatgcatcttcaagtatgcgtgatagcacctcacggcattcatcataggtatcatcatcaatttcgatatcaggatccattcctcctggtccagagataaggtattcagcaagacacattggttccagcctggctttatcatcggtagcaagaccatcatgttggaggcgtaattgcgaaggattatcttggtgttctggaaggtctggaaataccttgctgtcatgaggatgggataatccatatgttgacatcatattattgataaatattggtttaattcccgttggcatgatgagttacacatcctttttattacatggaattaacattctataaatagcatgtttttgtcaaacagaattcactcagcacgcaatcaattaaactaaaagctaaatttgcagtatttgtgcctcacctccattaaaattgtactctgcgtgattttactttcagattctgcaaccacaggcaatcctgttttacaagatattaaaccctgcaacccaaccatttcactcactctagttaccatccgaaatcatcggaggtgaggcttatgaaaatgaatgacaagactcctgaattctgggctgcggttttgaccggactcaaaaatgcgtggccccagatacttggggcgttaatggccggactcattgcctacggccgactgatatacgacggcgccacccgtaaaaataaatggcttgagggcgtcctgtgtggcgctctttccttatgtgtcaccagtgcgcttgatgtggtaggcctgccggtttccatttcgcctttcgttggcggaattattggctttgtcggtgtggacaagctgcgcgaaatcgcaattagcgcactcaaaaaacgtgcaggggttaatgatgagaatcagtgaaaaaggcattaccctaatcaaagagtttgaaggttgtagcctgacagcttatccggacccgggaacggggggagatccctggacgattggttatggctggacccactctgttgacggtaagccagttaagcccggaatgatgattgacgaggctactgccgagcgcttgcttaacactggtttagtcggttatgaaaatgatgtgtccagactggttaaggtcaagttgacgcaaggccagtttgatgcgctggtgtcgttcgcgtacaacctcggcgcccggacattatcctcatcaactctgctgcggaagctaaacgctggtgattacgctggcgccgctgatgagttcctgcgctggaataaggctggtggcaaagtactgaacgggcttacccgtcggcgtgaggcggagcgtgctctgttcctgtcatgatgttcaactggaaaacgatgtttgttggcctgttgcttgtctcgctaattgttgccggtcggctggcaaatcactaccgaaataacgccatcacctacaaagagcagcgcgataccgttactcataggctgacgctggcgaacgcgacaattaccgacatgactaagcgccagcgtgacgttgccgccctcgatgaaaaatacacgaaggaattagccgatgcgaaagctgagaatgatgctttgcgcgatgatgttgccgctggccgccgtcgcctgtacgtcaacgcaacatgccccgcagtgccgacaggtaaatccacctccaccgcccgcatggataatgcagccagccccagactggcagactccgctcaacgggattatttcgccctcaaagagcgagtgaagacgatgcaaaagcaactggaaggggcgcaggcgtacattcgcacccaatgccacggtaatgcaggaaaaactagtaaccaatggtgactgtattaaaaaggtactcccgggcagggggcgccacgggtggcttcgggctcgcgggaatcggctgatttttgattttttagtctctgtcagcactgaaaaataaccttaaaaatcaatacatttactgttttcagtgtcgaagtggtacgttttttgttcgacactgaacgccattttcaccgtatacaggaaaagagcacgactgtggatcaggaaattaaaagcctcgaattaaacatcacacagctttcggccatcactggtgcacaccgacagaccatcgccagcaggctgaagggcgtaaaaacctcaggtgggaacggtagtaacctgaaaatctaccggctggtggatattctgaccgccatgatgacgatgccggctgttaccggggagaatgaccccaataagatgaaaccctcagatcgacgggcatggtttcagtcggaaatgacgcgtattgagctggaaaaggagatgagaactctgatcccggccagcgaggtgctgagcgtttatgctgtcatggcaaaaacggtcgtcaagacactggagatactgccggacttactggaaagggatgcggcattgccgcctgatgcgctggaaatgacgcaaaaaattattgatcaactcagggaagatctggccagcatgacataccaggcctgcgcggatgctataaacggagatgatgatgacaacggtgacgaagggcaagaggaagagcaggaatagtttagcctctgccgttgttgccggatgtgatatctcatcgatgttcaggccgccgcgcaggatgaaaatatcggatgcggtcagaaaatatatgcgcgtaccacgcgatgcgggaaattctgtggcatgggaatccaccctgaccccctatgtggtggaagccatgaactgcctgtcatcacgcagctacgatgccgtggtatttgtcgccccggcaagaaccggtaagacgctggggctgattgacggctggatttcctacaatattgtctgcgatccgtctgacatgctggtggttcagatgactcaggacaaggcgcaggagcactcaaagcggcgtctggcaaagatgtttcgccacagtccggcgatagcaagaagactcagccctcaccgtaacgataataatgtgcatgataaaacgtttcgtgatggctcgtttctgaaaattggctggccatcaatcaatgttttttcgtcttcggattttaaatgtgtggcgctgactgactacgatcggttccccgaagatgttgatggtgagggggatgcattctcgctggcgtcgaagcgtaccacaacgtttatgtcgctgggtatgacactggtggagagctcgccggggcgggaaattaccgataccagatggaaaccgtcatcaccgcacgaagcaccgccgaccacaggaatactttccctgtacaaccgtggcgatcgtcgtcgctggtactggccgtgtccgcattgtggcgaatattttcagccatcaatggcgaatatgaccggctatcgccatattgccgaccctatggaggccagtgaagcagcgcggattcagtgcccacactgccataagttgactgaaccacagcagaagcgtgagctgaataatcgtggcgtctggttgcgggaaggtcagcacattgaccgcgacggcaatattaccggcgaagcccgccgctcacgtatcgccagtttctggatggagggaccggcggcggcttatcagacctgggcgcaactggtttacaagctgctgaccgccgaagaggaatacgaacgaaccggcagcgaggaaaccctgaaagccgtcatcaatacggactggggattaccctatcagtcccgtcgctcgctggaggcacgcagcggtgacgcgctgatggcacgcgctgaggacgtatcaaaacgtaccgtttctgacggggtgcgttttattgtggcaaccgttgacgtacagggcggtaaaaagcggcgctttgtggtccaggtagtgggctatggcgcatatggtgaacgctggatcattgaccgctacaacatccgttattccctgagagtgaatgaggatggcgaaagccagcctgtcaatccggctgcaagaccggaagactgggatttgctgaaaacggatgtgctggaaaagacgtatccgctggcggcagatcctgaacagtttatgccggtactggcaatggcggtggactcaggcggtgaagacggtgttaccgataatgcctacgcgttctggcgaaggtgtaagcgaaaaggcgttgccgggcgcgtttatctgttcaagggagacagtacccgacgcgagaagctgatcaccaaaacctatcccgataacaccgaacgctcagaacgtcgggcaaaagccaggggggatgtgccgttgtatctgttacagaccaatgccctgaaagacagggtagctgccgcactggagcgtgaggagccgggggcgaattacattcattttcctgactggctggggccgtggttctacgaggaactgacctatgaagagcgcagcgcagacggaaagtggaaaaaaccgggacgcggtaataacgaggcgctcgatctgatgtgttacgcccacgcgctggctattctccgtggctatgagcgaatcaactgggaaaaaccaccaggatgggctcgcttaccggaaaaagacgccgcaaaaaccacgcagcctgttgaggttcgccagcaggagcaacacgaaggaggagagaaagccgtgaaagccaggaagaaaaaaattttacccgcctggggcggtggttccggaggagggtggttatgaccagggcagggctacaggagttgtacaacgcctatctggaggccgagcttgctgtactgaaaggcaagtccatcatgcttaacggtcagtcaatgacaatggaaagcctggaggaaatcaggaaggggcgccgcgagattgaagacaggttacagcggttaaataatccgcgacggcttttcacccgggcgaggttgtcatgaattttatcgataaagctatcagcatgatgtcgccgggatgggctgtatcaagactccgatcgcgggcagtaataaaagcttacgaggctgcaatacccacccggacacataaaattaagcgtgaaaaccgcaacgccaatcaactaaaccagattgccggaaagtccctgcgggagcaggcccgctggttcgataacaatcacgatctggtggtgggggcgctcgataagatggaagagcgcgttatcggggctaaggggatcatcgttgagccacaaccactgacggtggccggaacgctgaataacgcgctggcggaacaaatccgcgccagatgggcagagtggtccgtgtcgccggacgtgaccggacaatatacgcgcccggtactggagcgccttttgttacgcacatggttgcgggacggggaggtgttctcccagatggtggcgggaaaaatgccggggcttgagccggtggcgggcgtaccgttctggcttgaggcgatggaaccggattatgtcccgatggaacagacggacagtacaaataatctgattcaggggatctattttaacgactggcaaaggccaaaaagttacatcgtctgtaaatcctggccgggatttgccaccgctatggtggccaccaagcttatcgatgcagaaaatatgctgcatcttaaattcacccgtcgcctgaatcaggcgcggggcgtcacgctgctggcgccggttattatccggctgctggatctgaaggagtatgaggacagtgaaaggctggccgcgcgtatttcggcggcttttgccatgtttatccggcgcagtgacgcaatggtacaggatggtgacgcgccagattatgcggataaagaccgcgatctggatattgaacccggcaccattctgaaagacctgttgccgggagaggatatcggcaccatcaaatctgacaggccaaatgccaacctggagtctttccgtatggggcaactgcgggcggttgccgcaggtgtacgcggaagtttttcttctattgctagaaactacgacggcacctacagcgcccagcgtcaggagctggtggaggctcaggagggatacgccattctacaggataattttattgctgccgtcagtcgcccggtttaccggcgatggctggcgacggcgattacggcgggtgtgatagatgtgccgacggacacggacatggcgaccctgtttaatgccgtgtattccggtccggttatgccgtggatagatccgctgaaagaggcgaatgcctggaggatactgatacgcggcggggcggcaacagagagtgactgggtgcgtgcccgtggcggcgcacctgctgaagtgaaacgccgccgtaaggcggaaattgacgaaaaccgtaagctgggactggtatttgatactgatccggcacatgacccgggggaacaggataatgccggaagtgaagacaacagtggcggcgataaaaatgccgccggtgatgacagcagggaacggacgcggggagggaagcagtaatagctggtattccatcagggctgcagccaataacacggcggaagtccgcatttatgacgagattggtggatggggaatttcggctcgctggtttgcagaagaactggctgcactgggacagattaaccggataaatctgcatattcattcacctggcggagcagtactggacggaatagccatttataacctcctgaaaaatcatccggcgcaaaaaacggtgtatatcgatggaatggcctgctcaatggcatccgctattgcgatggtaggtaatcccatcattatgccggaaaacgccatgatgatgattcataagccgcgcggagtggcggggggtgaggcggaggatatccgggaatatgctgacctgcttgacaagatcgaaagcgtcattatccccatctataccgaaaaaactggaaaaacgcctgaagatattgctgccatgctggcaaaggagacctggatgagcggcgcggagtgcgtcagtgaagggtttgccgacaaactgatacagcctgtaaaagcaatggcctgtattcattcaaaacgtgttgaggagtttgagcatatgccacagagcattaaaggtatgattatcgccccgcagggcaatgcaggcgcgcaaccgcagccacaggcaaaagcccctgagtcacagattcagtcgcaggctcagtcgctggtgactgtagatgaaaatgccattcgcgcacgcctgcaggaagaacagcgtaaccgtatcaccggcattcagaatgtgttttcactttccggcgatcgttatgcctcgctgatggcaaagtgcattgctgatgtggattgctctctggaaatggcgaaggacagactgttggccgagatggcgaaaggtattacgccgactaaccagctgaatggtccgcagaatcgcgcagagtttcatgccgggatgtataccggaaacggtaatattaccggcgacgccgttcgcgctgccgtgatggcccgcgcaggctatgaagaagcgcagaaggataacccgtacaactgtatgaccctgcgtgaactggcgcgaatttcgctggtggcgaggggtacaggcgtgtccagcatgaatcccatgcagatgatcggcatggcatttacgcacagcacctccgatttcggtaacattctgctggatgttgcaaacaagtccattctgcagggctggcaggaagcgccggaaaccttcgatgcctggaccaaaaaaggacagttgtctgatttcaggattgcgcaccgtgtgggtatggggggattcagttcactgcgtcaggttcgtgaaggagcggaatacaaatacgtcaccacaggggataaacaggcgaccattgcgctcgctacctatggggagctgttcagcattacccgccaggccatcatcaatgatgatatgaatatgctgacggatgtcccgatgaagctgggacgtgcggcaaaagccaccattgccgatctggtttatgacgttctcatcagtaaccagaaactgtccagtgataatgtggcgctgtttgacaagacgaaacacgcaaacgtccttgaaaaagccgttatggatgtggcgtccctggataaagcgcgccagctaatgcggatgcagaaagagggcgatcgccacctcaatatccgtccggcatttgtactggtgccgacggcgatggagtctgtttcaaatcaggtgattaaatctgtcagtgtcaagggggcggatattaacgccgggatcattaacccggtgaaagatttcgccacggtgatcgcggagcctcgtcttgatgacgccagtcagtccactttctatcttactgcagcaaaaggcagcgataccgttgaggtggcttaccttaacggcgtggatgagccgtatatcgaccagcaggaaggattcacggtggatggcgtaaccacgaaagttcgtattgatgcgggcgttgcgccggtggattatcgcggcatggtgaaatgcaccgtataacccactaaaagcagacattaagcgatacggccctgacgggctttttttatacctgaaatccggcacggcgtgccggaaaggagaataaccgtggctaagaattacgtggaagacggcaaaacgattgaaattgtggcgaccacgtcactaaagagcggagatctggtacaggtcggcgatatgttcgctgtggctgttaccgatattgccgccgggagcgccggaaccggcatcgcagaaggggtattcagcataccaaaactgacaacagaggatattgccgtcgggaaaaaagtgtatctgaaggataacgtggttcagacggatgcaaccggcagcctgccgtatgtcggggtggtatgggcgccagcggcaaacggtgatgaaaccgttccggtaaaaattaatggctgacctttttgacgggatgaaaaggcgcatggatgcacttatcgcagaacgcttcggcatgaaggtcaacatcaacgggactgactgcatagtggtggagtctgattttctggctgaactggggcctgttgaaggaaacggaaaaaacgtagtggtgttttcaggcaacgttatcccgcgccggggagacagggtggtactgcggggcagtgagtttaccgtgacccgtatccggcgttttaacggtaagccacaactgactctggaggagaacaatggaggtaaaggggcttaaagaggccatttcagtacttaaagaacttgatcgtggatatgtgacccgggcaaaaattcgggccattaaccgggtggcaaaacgggtggtcagcgtgtcagttcgcagtgctgctgctttggtggtggccggagacaaccgacggcagggtattcccgtcagaacggtaagacgtcgcgccagagtcaggctggccagagcggacaagccttttgccaacatttatgtgaactgtgatccgctgactgccatcaggttactgagttcgccaccatcaaccccgatgagggggagaaaaggtaagccgctacgtataggaaaataccgttttgaccgggggtttattgcgcaggctccgaacggatggtggcaggtatttgagcgttccggtgccggaagatacccacttaatgtggtgaaaatcccggttgctgatgcattgcgccatgcgttcaacacgcaggttgttttacagatgaaaacggagatgcccaaagagctgaagcatgaaatcagttatgaactgaggagattcactaaaaaatgacccgacacagtgcagtacggcaggccattattgccgcattaaaaaagaccgatgatggctccaccacgttttttgacggtcgtccggtcgtggtggaggaggatgagttacctgcggtggcggtgtacctgagtgatgctcagtataccggtcctgaggtggacggtgatatctggagcgcggtgctacatgtggaagtatttctgaaagccactgcaccggacagcgccctggatgaacagatggagaacagggtgtatccggcactggggagcgtggcgggactgggtgacatcatccggacaatgtcggcgcaggggtataactatcagcgagacgatgaaatggcgatgtgggggtcagccgatctgagttacgacatcacctattccatgtagaggaaaagagaatgacagacacgacaattcctaatccacttgcgccggtaaaaggcgcaaataccacattctggatgtacaacagcgagggtgatccgttcgccagcccgctaagtgataataactggctgaggctggcaaacgtaaaagacctgcagccgggagaactgacggcagatgcagaagataataactatcttgatgacgagaacgctgactggaaaagtaccacacagggacagaagtctgccggggatacttctgtgacgctggcgtggaagccaggtgaggacgtacagaaaaagcttattcaactgttcacgaccgggcagaagcgcggattccggatcaagtatccgaacggcactgttgatgtgttcagaggctgggtgagctcgctggggaaaacggtgcagagtaaggatgagatcgcccgtacagtaaaaattaccagtgtgggccgtccgtacatggctgaagaggatgcaccggaagtggttagtgttaccggactgacagtggaaccgacaaatgccaccgtgaaggtcggcgccacaacagcggttacgttcacggtgaaaccggataacgtgacagataaatcactgcgtatcgcaacgtcagatccgactacagccaccgtcacgcaggcggaaaatattgccactgtaaaaggtgttaaggcaggtacagtgaaaattattggcatgacaacagacggtaattttaccgctattgcggatattactgttcaggcataacccacctctcgtcctgttttggggcatttttttcaggaataaatcatgtttttaaagaaagagacgtttacccggggggatgcgtcggtggcattgttcgagttatccggcctgcaacgtattgagtacctggagttcatccagaaacgtactgcgaaatatgacacggatatggatggtacgacggaagcggataagcgcgtggcttatatgcaaatggcactggaaattaatgcctggctggtatcccgctcgcttctgaatggtgattcttctcaggatgcagacacgctttatcagtcagtacaggcgaagtggtcgtatgaggcgctggacgcaggcgcagaaagtgttctgatgctcagcgggctgtctgcggataagaaagataacgccagtgattcaggtaatgaatcagaggacatgacgccggaaaagtcctgaataatgagcttcattttgtccggcaactggcccgggagttccggcggcctgactggcgccggatgctggacgaaatgagttcaactgaacttagtgagtgggctgatttctttcgggaaaacagtttcagtgatgccctgctggatgcggagttttccacgctgaaagcgcaggtgttcatgctggtgacggggaaagaaatcgatgcagcggacttcagtttgctgacattacccggagcggtacagagcatgacggagcaggatctgcttgaagtggcagtcggtattccgggaggagtgagatttgagccagaaagtcggtgatatcgtcatcaacatggatgttgatacagctaaagttgccgccggtcttcagactgccagtaacgggctggggaagctggtggacagcagtgatctcgttgaaaaacgcatcaagcgatgtatggagtccagcgccagaagtgtggcggcatcggcaaaaagtatcagtgccgctatggcgcaatcacaggttgccacacgcacacagagtgacgctatggcacaactggcgcgtgaggcgaacgaggccagagaaagggctgtcgacctgaatcagaagttaagggcggaagctgcgcaggcagcggtggttgcacaggctcaggatgcagccgcagcggcattttaccgtcagattgacagtgtaaaacagttaagcggtggtctgcaggagttacagcgtatccaggcgcaggtacgacaggcgaaaggacgcggagatatttcacagggcgattatctggcgctggtgtctgaagctgctgcaaagacacgcgaacttaccgatgcggaggcgctggccacgcagaaaaaagcacagtttatacgtcgactgaaagagcagacggcggtacagggcctctcccgtactgagttgctgcgggtgaaggcggctgaactgggggttagcagtgccgccgatgtctatatccgcaaactggataccgcaacaaaatccactcatgcactaggactgaaatcagcaatggcgcgccgcgagataggcgtactgattggtgaactggcacggggaaattttggcgcccttcgcggttccggtatcacgctggccaaccgggccgggtggattgagcaactgatgtcgccgaagggcatgatgctcggcgggctggttggcggtgtggctgcggcggtttacggactgggtaaggcgtactatgagggggcgaaagaaagtgaggagttcaataaacagcttattctgaccggaagttacgccggaaaaaccacaggcaagcttaatgaaatggcgaagtcgctcgccggaaatggcgtcacgcagcacgacgcggcaggagtactgacccaggtggtcggtagcggagcgtttaccgggcaggcagtggcaatggtatcccgtaccgcggccagaatgcaggaaaacgtggggcagtcagtggatgaaaccatccgccagtttaaacggctgcaggatgatccggtgaacgcggcgaaagaactggacagggcactgcattttctgactgccacccagcttgaacaaatcagggtgctcggtgaacagggaagaacggctgatgctgcgaaaattgccatgtccgcgtattcggaagagatgaataaacgggcgggtgacgtacatgataatctgggctggatcgagaaggcatggaatgccgtgggtgatgcggcgaagtgggcgtgggatcggatgctggatatcgggcgggaagatacgctcgatgaaaaaatcgcgacactgcaggaaaaaatcgcgcgcgccagaaaaacgccatggacagtgtcttcctcccagactgaatatgatcagcagcaactgaacgaacttcaggaacagaaacgccagaaggacctgctggatgcgaaggcgcaggcagagcgtaattatcagaagactcagaagcgccggaacgagcagaacgccgcgctgaaccgggataatgaaactgaatccctgcggcatcaacgggaggtggcgcgcattaccgccatgcagtatgccgatgcagcggtacgcaatgccgcgctggagcgtgaaaacgaacgccataaaaaagcaatggcacggcagaaggaaaagccaaaggcttactacaacgacgaggccgggcgactgcttttgcagtacagccagcaacaggcgcagactgaagggctgattgccgccgcgaagctttccacgaccgaaaaaatgacggaagcgcataagcagcttttgtcatttcagcagcgcatcgctgatttgtccggtaaaaaactgacggcggatgaacaaagcgtactggcacataaggatgaaatagcgcttgcgctacagaagctggatatctcacaacaggatttgcaacaccagaatgcctttaatgaactgaagaaaaagacgctcacattaaccagccagctcgctgacgaagaatcccgcgtcaggcagcagcacgcactggcgctggccacaatgggtatgggcgatcagcaacgtggccggtacgaagagcatctgaaaattcaacagcactaccaggaacaactggagcagcttaagcgcgacagcaaggcaaaagggacatacggttctgacgaataccgtcaggcggagcaggaacttcaggccagtctcgatcgccgactggctgagtgggcggattataacgcgaaagtggatgctgcgcagggagactggacgcagggcgcgtcgcgggcgctggataactttctggcgcaggggggcaacgtggcaggcatgacggagaacgttttcacaaacgcatttaacggcatggcggacagtatcgcgaattttgccgtgaccggaaagggcagtttccggagcctgacggtctccatcctggctgacctggcaaaaatggaggcacgtattgcggcttctaaactgttgggttcagtactgggtatgttcgtctttggcgcatcagcaggcggaagtacaccatccggggcatacagttcagcggcgctgtcggtcattccaaatgcggacggcggcgtgtaccgctcagcaggactcagtcagtacagcggcagtattgttaacagaccgacgttctttgcatttgccagaggggcggcagtaatgggagaggccggtccggaggctatactgccgcttcgtcgcggtactgacggtaagctgggggttgtggcagcaggttccggagggatggcgatgtttgcaccgcagtatcatattgcaatcagcaacacggggccggaactgacgccgcaggcgctgaaggcggtttatgatctgggtaaaaaggcggcggctgatttcgtgcagcagcaggggcgtgacggcggcaggctgagcggggcatatcgatgatgaaaacctttcactggaaagttgacccggacatgggggtggattcggaaccacaggtgtcggtggtgaggttcggtgatggctacgagcagcggcgtgcatccgggatcaataatgacctgaaaaaatacagtgtgactatccgcgttgaccgggaggatggtccgggactggagggctttttgtcacagcataacggtgtgaaggcgtttttgtggactccgccttacggataccggcagattaaggttgtctgccggaaatggagtgtgaaagcgggattgctgaaaacaacattcaccgcgacatttgagcaggttatttcttagtatttttgatcgaaacgatcgataaatatgattgaactttctaacctgctgctgtttcactgagcccgcacagtcaataatcaaaaaaaggaaatgttatgaaaaagattgtcgtggcggttttagttggtctggcgttaggtagcatcggcgtggctaacgcagcagggtataaaaataccgtttcaattggatatgcctacacagatttaagcggctggctttccggtaatgcgaacggtgccaacatcaaatataactgggaagatctggacagtggattcggggcgatgggttcagttacatacacctcggctgatgttaataactatgggtataaggtaggtgatgctgattatacctcccttcttgttggtccttcataccgttttaacgactatctgaatgcttacgtgatgattggtgcagcaaacggacatattaaggataactggggaaattctgacaataaaaccgcctttgcttatggggcaggtattcagcttaacccggttgaaaatattgccgttaatgcgtcttatgagcatacaagtttttccactgatgctgacagtgacgtcaaagctggaacctaggtgcttggcgtaggttacagcttctgacctttaacatcgatacagatttaatgccctccagtgagagggcttttttatgggtaaaacgaaattatgacgatatggctatgttgctgttatttctcaatgacaccacaggcaaaacgtgcaccgccaccacccagtggagcaggtttatcggagtaattgtcaccgcctttatggatcatcaatgagtgacctttcagttctgacagtgatttaaggcgtggtgccagtaacggatacgtggctgtaccatctgcattgacaaccagtccaggcagatcccccaaatgccctttgtcattatatgggccaagatgtttcccggttttttcggggtcaagatgtcctccggccatgagcgccggaacctctttaccgtctttcattcccggcatacaacttgggtttgtgtggacatggaagccgtgaattcctggcgtaagaccatttaggtgaggagtgaaaagcagaccgtaaggtgtctctgaaactgtgatttcacctatgttttctcctgttccgctggacagggcatcgttcatctttacagtcagggtattctctgccattgctgaacaactgatgagcgcaccagctaccagcgacaatattgtgtatttcattagttacctcgttttttggttgtatcgtaaataccattaataaaagcaggtatatgtttgcaagataaataataaaggatctctcatatatgcaggatataccacaggaaaccctgagcgagaccaccaaagcggagcagtccgcgaaggtggatttgtgggaatttgatttaaccgcgattggcggtgagcgctttttcttctgtaacgaaccgaacgaaaaaggcgagccgttaacctggcaggggaggcagtacgaaccgtacccgatacaggtacaggattttgagatgaacgggaaaggcgcatctccccgcccgaacctcgttgttgccaatctctttggtctggtcacggggatggcggaggatttgcaaagtctcgtcggcgcgtcagtggtaaggcatcaggtttacagcaagtttcttgatgcggtgaatttcagtaacggcaatccggacgctgacccggagcaggaggcggtagcgcgctataacgtggagcagttgtcagaactggattcatcaactgctaccattattctggcatcaccggcagaaaccgacggttctgtggtgccggggcgtaccatgctggcggactcctgtccgtgggattaccgggatgaaaactgcggatacgacggcccgcccgtggccgatgagttcgataagcccacctcagacccgaaaaaggataaatgcagccactgcatgaaaggctgtgaaatgcgtaacaatctggtgaatgccggatttttcgcttccatcaacaaactgtcttaacaggttcccatgattaacgatgacattctggcacatgcccgacagtgtgcgcctgcggaatcgtgcggttatgtggtcagaacggcacagggagagcggtattttccgtgtgaaaatctgtctgctgaacccacgatgtattttcgtatatccccggaggattacctgaatgcccggaaccgcggcgacatcgtggcgctggtacacagccatcctgacggtaagccctgtctcagcagtgcggatcgtaccctccagatacaaagcgggctggactggtggctggtctgtgataacaggatacataaattccgctgcgtgccacacctgaccgggcggcagtttgagcatggcgtgacggactgctacacgctgtttcgtgatgcctaccatctggccgggattgatatgccggatttcgatagggaagatgactggtggagtcagggtaaaagcctctatctggatcacctggaggcggcgggattttaccgggtgaatccggaggatgcgcagcccggcgacgtgctgatttgctgttttggttcaccgacgcccaatcatgcggcgatttactgcggcaacggtgaactgttgcaccatattccggagcagttgagtaaacgagaggggtataacgacaaatggcaacgacggacacactcaatatggcggcaccggcaatggtgcgaatctgcctttacggggatttacaacgatttggaaagcgcatcagcctcagcataaagacagcggcggaaggcatacatgcgctggcgatacaactccccggattccggcagcgaatgaatgagggctggtatcaggtccggattgccgggagcgatatggcgccggatacccttactgccagactgaacgaatcgttaccgccgggggcagtggttcatattgtaccgcgtatggcgggagcgaaaaacggtatctggcaggtggtagccggggcagcgctgattggcgcgtcatttattcccggtctgaatgctgtagcggcggcagtattgttttccgcaggaaccagtatggcgctgggtggtgtggcgcagatgctgacacctgtacccaaaacaccgacggtgggtcaggcagataacgggaaacagaacacgtacttttcttccctggaaaatatggtggcccaggggaacccggtgccggtgttgtacggtgaaatgaaaatcgggtcacgggtgatatcgcagatgatgagtacccgggatgagagcacgtcgggaaaagttgtggtgatcggctccccgttacaggcaaacaccacgtcgcggcaggacggcgggattaccagaccgtctgtcgtcatccggcagtgataatcatgacaacatgagctgatacacatgaccgccattacggcggttttgttatttatggagccaggagaatgagcaaaggtggagggaaggggcatacaccacgtgaggcgaaggacgatctgaagtccacacaacaactgagcgtgattgatgccctcagtgagggaccgatagtcggcccggtgaacggtctgcagagcgtgctgattaataacacgccggtggtggacgcggacggtaacagtaatattcacggcgtgaccgtggtatatcaggtgggggagacaccacaggcaccgctggaaggttttgaggcttccggcgcggaaacggtgctgggtgtggaagtgaaacacgataatcccgttacccgtactgttgtctcagagaatgtcgaccggctacgcttcacctttggtgtacagatgctgcaggagaccacggacaagggggaccgtaacccgtcctccgtgaatctgctgatacagtttcagcgtagcgggatctggaacacagaatttgatatcactattaacggcaagatcacaacacaatatctggcatcggtagtggctgataatttaccgccgcgcccgttcagtgtccgcatggtcagggtgacaccggacagcaccaccgacaggcttcagaacaaaacgctgtggtcgtcgtatacggaaatcatcgatatccggcagggttatcctggcacagcggttgccggtctgctggtggatgcggaacagttcggcagccagcaggtcacgcgtaactaccacctgcgcggacgtatttttcaggtcccctcaaactatgacccggatacccgcacatataccggcctgtgggacggggcgtttaaaccggcgtacacgaataacccggcgtggtgcacgatggataaactgacccacccccgttacgggctgggcaggcgtatcgggggggcggatgtggataaatgggcgctgtacgccatcgcgcagtactgcgatcaaccggtgccggacggatttggcggcacggaaccccgcatgacgcttaatgcgtatattaccacccagcgtaaggcgtatgacgttctggcggatttctgctcggtgatgcgttgtatgccggtatggaatggccgcaaaatgaccttcatccaggaccgcccctccgataaagcatggacctacaccaacggtaacgtggtgggcgggcgctttaaatacagcttcagtgccctgaaagaccgccataacgcggtagaagtgagatacaccgatccgctgaatggctggcaaacctccacggagctggtggaagaccatgcctcacaggcccgttatggacgcaatctgctgaaaatggacgcgttcggctgtacctcacgtggacaggcgcaccggacggggttgtgggtgatgatgacggagctgctggaaacgcagaccgtggatttttctgtcggtgcggaaggtctgcgtcatacaccgggcgatattattgaggtctgcgacaacgattacgccggggcgtcggtcggtgggcgtatcactgacctggatatttccacccgcacgctgacgcttgaccgggaaataacactaccggaaagcggcgccaccacgctgaatattgtcgggcctgacggtaagccgttcagtacggagattcagtcgcagcccgcaccggatcgggtggtaacgaaagtcctgccggaaaccgtgcagccatacagtatctgggggctgaaactgccctccctgaagcgccgccttttccgttgcgtgcgtattaaggagaatgacgacggcacatacgctatcactgccttgcagcacgttccggaaaaagagtccatcgtggacaacggggcgcactttgacccgttaccggggaccaccaacagcattattccgcccgctgtgcagcatctgacagtcagcacggataacgacagtaccctgtatcaggccaaagcgaagtggggcacgccgcgggtggtaaaagatgtgcgttttgtggtgaggctgaccacaggcagtgggaacgagggcgatccggttcgtctggtgacaacggcgacgaccagcgaaacggagtacgccttccacgaactgccactgggtgactacacgctgacagtcagggcaataaacggttacgggcagcagggtgaaccggcgtccgtggcattcagtattcaggcaccggaagcgccatccacgattgagatgacgccgggttattttcagataacggtgacgccgcaccagactgtctacgatgccagtgtgcagtatgagttctggtactccgccacgcaactggcgactgccgccgatattcagtcaaaagcacagtatctgggcgtcgggtcattctggataaaggatggactgaaaccactgcatgatgcctggttttacgtgcgcagtgtaaatctggctggaaaatcagtatttgcggaagcatccggacgtccggggatgacgcgaaagggtatctggatttttttaagggactgattacggagacgtatcttggtacggagttgctgaaaaaaattgacctgacggagaataacgccagcaaactgcaacaattttcgaaggagtggcaggacgctaacgataaatggagcgccacgtggggcgtcaaaatagagcagaccaaagacggcaaatattatgtggccggacttggactgagcatggaagacacgcctgacgggaagataagccagttcctggtggcggcggatcgcattgcttatattaacccggcaaacggaaacgagacgcccggattcgtcatgcagggcgaccagataatcatgaatgaggcgttcctgaaatacctgagcgcgccgaccattaccagtggcgggaatcctccggcattttccctgacgccggatggaaagctgactgcgaaaaatgcggatatcagcggccatatcaacgctgtatctggctcgtttacgggagaaatcaatgccacctccggtaagttttctggcgtgatagaagcaagagagtttgtcggtgatatctgcggctcaaaagtcatgcagggcgtgagcatcagggcgacgaacgacgaacgcagcacctcaacacggtataccgacagcgccacctatcagatagggaaaaccatcacggtgatggctaactgtgagcgtaacggtggctccggtgccatcacagtcacgataaatattaacggccaggtgaaaacggcggaggttatgccgtataccgcagggattccggccatgtatcagaccgtcgtcttttcggtctacaccacttcacctgtcgtggatatcagcgtctctctgagggtccgtgggcagtacaccacgtctgcttccgtctggccgctggtgatggtttcccggtcggggagcaacttcacaaactgaccggatttccggtccctttcgtttaatgaggaacaaatatgactatgtcgcgcgtaatttctctggcggcagggctttccctgtccgttttattttccactgctgccgttgccgataacggaagaggaagcggcaacagcaatattgaaaaccagacccggatttataccggcaccgaccgtgggcagaaacagcaccgcgaggcaaagggaaaaacaatcacgcggagcgtccagtgttctctgccggcatatttacgtgacccggataatcagtgctgagatgtgaatgaatctgaagcctgcctgcgggcgggcttttttatggaggcaatatgccagtacttatttccggcgtactgaaggatggtacgggaacgccggtacagaactgcaccattcagctgaaggcctgccggaccagtacgacggtggtcgtgaatacggtggcatcagaaaatccggatgacgccgggcgctacagcatggatgtggagcaggggcagtacactgtcacgctcctggtggacgggtatcccccgtcacatgccggagttattacggtttacgatgattcaaagccgggcaccctgaatgattttctgggggccatgacagaagacgacgtccgcccggaggcgctgcggcgttttgaggcgatggtggaagaagttgcccgccaggcatcggaggcatcgcggaatgccaccgccgcagggcaggcatctgaacaggcgcagacatcagcaggtcaggcatcggaaagcgccacggcagcagtgaatgcagccggagcggcagaagcatcagccacacaggcagcctcatccgcagcatctgcggagagcagcgcaggtacggcgaccacaaaagccggggaggcatcagccagcgcggcgtcggctgacacagccagaacggcggcagccgcatcggcagccgcagcgaaaacatctgaagcgaatgcagatgcctcccgtactgccgccggcgattcagctgctgccgcagccgccagcgcgacggcggcgcagacatcagcagagcgcgccggagcatccgaaaccgccgcgaagacgtcagaaacgcaggcggcttccagtgccggtgatgcaggtgcgtcagccactgcggcggcagcgtcggaaaaggcggcagccgcatcggcagccgcagcgaaaacatctgagacaaatgcagcaacgtcagcaagtacagcagcggccagcgcaacagccgcctcgtcatcagcatcggaggcatccactcacgccgccgcatctgataccagcgcatcactggcggcgcaaagcagtactgctgccggagcagcagccaccagagcagaagatgccgcaaaacgggcagaagatatcgcggacgtgatttccctggaagatgccagcctgacgaaaaaaggtatcgttaagttaagcagcgccacggacagtgacagcgaagcgctggcagccacgccaaaggcggtccatgctgtcatggacgaggtacagaccaaagcgccgctggacagtccggcactgactggtacgccaacagcaccaactccggaaaccgcagctgcaggtattgaaattgccacggcagcgtttgtggctgcgaaagtggcgcagttggttggttctgcgccggaaacgctggacacgctgaaagaactggctgacgcgctgggtaacgatccgaactttgccaccactgtactgaataaactggcgggcaagcagccgctggacgatacactgacggcgctgtcaggaaaaagcgttgacggtcttatcgaatacgttggtttacgggaaaccataaatcacgccgccgatgcattactaaaatcacagaacggtggcgatattccggaaaagccgctgtttgtacaaaatatcggagcgctccctgcatcaggtacggctgttgcagcgaacagactggcatcacgcggcgcgcttccggcactgactggtgcgacaagaggcagcgatagcggcctgataatgggcgaggtctacaacaatggctatccgacgcaatacggaaatattttacgtctgaccggaactggtgatggggaaatcctcattggctggagcgggacaaacggtgcgccagcgcccgcatatattcgcagtcatcgagataccgccgatgctgagtggtccgaatgggcgatgctctacacctcactaaatccgccaccgaattcgtatccagtaggtgcggcgatagcatggccgtctgatgctaccccagccggttacgccctgatgcaggggcaatcgtttgataaatctgcttacccgttactggctatagcgtatccgtccggcattatccctgacatgcggggctggacaataaagggtaagcccatcagtggacgtgctgtactgtcgcaagaaatggacggcaacaaatcgcacagtcacagcgccagagcgcaggatactgacttagggacaaaatctacctcatcctttgattacggcacgaaatcgaccaataccacgggcaatcatactcaccagttcggcggttatatcaattcatactggggagattccaatcacacctcatttcagcctggaggtggtgcatggacacaggccgctggcgaccatgcacatacagtttatatcggaggacatgagcacaccatgtatataggtccacacggacacgtcgttattgtggacgcagacggtaatgcggaaaccacggttaaaaacattgcatttaactacatagtgaggctggcataatgacttttaaaatgagcgaacaggcgcagacaattaaaattttcaatctgcgttcagatactaacgaatttattggtgcaggtgatgcgtatattccgccgcacacaggactaccggcaaactgtactgatatcgcccctcctgatattcccgccagtcatattgctatatttgacgctgaaacccagacatggagtttgcatgaggatcaccgcggcgagatggtttacgacacaacaaccggcaatcaggtttatatctccgctcctggtccgttgcccgaaaatgtcacatcagtttcaccaggtggtgaataccagaaatgggatggtaaggctaaggtctgggtaaaagacgaagcggctgaaaaagcagcgcagcttcgtcaggcggaagaaaccaaaagccgtcttttgcaaatggcatctgaaaaaatcgcgccattgcaggatgcagttgatcttggaatcgcaacagatgatgagaaagcgcggctcgacgaatggaaaaaatatagggtgctggtaaaccggatggatacagccgcccctgactggccggaaagaccagccagccagtaggcgttactgtggtaatgcaggccacctgattgctgtgaaggtggcctcatctgaaacacctgttaagtccagcgatttaagaacattgatataattcatcggcagaatcaaagctgctttattttcatcactgataatccccagcgttaattctatgcgccagtccttaatggcattatctgaatcgttaagtaatttctgccgggtgacttctgcctgccaaaattgaacgccgggcgttgataccggatgatctggtcatcgtggaaagcgaccctgaaaaaatcgacacttagctgtaaaatgacagtcccgccatccggtcatcataacggatttttcttctgcaccttctgaagcccgccatggcaggacgaccatgaatccgccgataaccttattgtgaaattaaggccaggaagagatgatgtctgtcggacagatactatatgtaaatttataaaggttttttgttatgccctttcatattggaagcggatgtcttcccgccatcatcagtaaccgccgcatttatcgtattgcctggtctgataccccccctgaaatgagttcctgggaaaaaatgaaggaatttttttgctcaacgcaccaggctgaagcgctggagtgcatctggacgatttgtcacccgccggccggaacgacgcgggaggatgtggtcagcagatttgaactgctcaggacgctcgcgtatgacggatgggaggaaaacattcattccggcctgcacggggaaaactacttctgtattctggatgaagacagtcaggagatattatcagtcaccctggatgacgtcgggaactataccgtaaattgccaggggtacagtgaaacacatcacttaaccatggcaacagaaccgggagtggaacgcacagatataacttacaacctaaccagtgatattgatgctgcggcctatctggaggaattgaaacagaatccaattataaataataaaataatgaatccggtagggcagtgtgagtcattaatgactcctgtaagcaattttatgaatgaaaaagggttcgataatattcgttatcgaggtatatttatctgggataaaccaacagaggaaataccaacaaatcattttgcagtggttggaaataaagaaggaaaagactatgtgtttgatgtttcagcccatcagtttgaaaatagaggtatgagtaatctgaatggcccattaattctttcagcagatgaatgggtttgtaaatatagaatggcaacaagaaggaaacttatttattatactgattttagtaattcaagtatagcagctaatgcctatgatgcattaccacgagaattagaatcagaatctatggcagggaaagtttttgttacatcaccgagatggtttaatacctttaaaaagcaaaaatattccttaataggtaaaatgtaagcgcaccgtggaggacgtctgtcagaaccctgtcaatccggcgatgatagtgtccacttaaattttgatggacactatcacagatgacagagtccacagcccggcgcaaacacggctgtcggtcaggaaagagaaaagccagtcgctgtacgactggatacaggcgcagttgaaaacattgtcggtgcatgcggagatggcgaaggagttcggttacatgctgaagcagtgtgatgcgttgagcgtgtcctctgctgcgacggtcgggtggagatcgacaacaacatctgtgaaaacgccttacggtgcgtggcgctgggccgacgtaactatctgttcttcggctcagacagtagcggcgaggcagcggcgatcatctatagcctgctgggtacgtgcaaactaaacgacgtggagtccgaggcatggttacgcgacgtgctgtggaaaatcagcgactggtcatcgaaccgggtgcacgaactgctgccctggaacctcgaaaccgtaaaataatccttacgctacgtcctaaacgggacgcttactgagttatgagggtgaggtggttttcttgatgagcatctgaacgccggtttgtgggatagggcaggtgggacggattcgggacagtcatccgtttttaactattggcatggattggtatcttttcgcatcatgggacgtgtgagcgcaggtatgacgcggtatgttattgacttagaatgtggttccaggaactggcgcatccatacccgagcagtttccggtgtcagtgccagcgggcgacgatcgtgaatgtctaccagacctttatcggctgcggaggtaacaatcagaaatccctctgcttcatcaccgcgctcaaacggcgtactgccaatggcagccatgaatatcggcttcccgtcctttctgtgaatgaaatacggctgttttttgtcgccttccttcttccactcgaaccatctatcggcaaaacagatagcccggccatgctgccatagtggcttaaacattctgctggaggccgctgtcgcgacacgggcgttaataagtggagctttatcccaccatccgggagcgtaaccccaaatcaccgggtcgagatgtaattgctcgtcgcgttcgctcaatagcaggactttagtcccgggcgccacgttataccggcctataggctgagggtcataagcaatattacgatcggcttcgtcggccagatatgccagatattcttcacgggtctgtgcttgtgcaaagcgtccacacatatgaaaccgccagtcgtcaggctgaaagtatagggcagggggaaaatgtggcgcgctccggtaatgatttacagggaatttatacagtaattcgaaatgaaaatttgtgtattgatgaattccgaaactgagcagtgagcaaactgatgaatcaatcgcaaattgcgtcgaatctcgacggctttattccccagtttcaccccatagcttccccgtaggaaattgagccataaaaaaaacagccctgacaggctggtttttaaggggaattttggtcggcacgagaggatttgaacctccgcccccccatgttggcggtagcctgaataattatcttggtaaaggttaactatcataaaatggtacaccagtctttccaggaggaggagtgtaaaggttttggctcataaacaccgtcatagtaaagaccacaaatactgcaatcttcatttttatatttatcattgaatgctaaggtaagcttgtcatagacatcaatatttgattgccattcaggtgaggtattcattgaatcataaattaatacttttttcacttcactatcatagcctacaatgcactctgcatgtagacattccgagccaagtgaaggcctgatcaacatcagtggtccatggttttgtaattcgtaagaaataaaactctcaaagtcatcttctacagtactattgaaaacttctgcctgtaaagcttctttaatgtttgtaaaaagagaggattcaggtattttttgcacattcatttcttttaataaattctcacattctattatatcaataccctctaatatattattaaacgcttgattatcagaagtgatgtcctctaatgcactataattattgccatctctggatttgataacatttaatgagcaaacccagcaattattgtagagggtgttgcctgtggtatcaaactggctttgaaagttacgatggtgaataatctgaccctgaggagttgctgtattacttctgtaaacgctgcctaaactattttgaatgtgtcttaacataatatactcgccgaatagtaattttgttaatgtaattatatactacagtgtggatattaatacaattcttttgttgttaattattatttatgaaattaattaaaagtgaataagttagaggtgtttgttggccttaaaattacatttgttgagggggcttatatgatatgtttttattgtattgtcgcatttttcttaagctgaatccggattttggggaggtggctaaatgtaaatgacgtggtttaagataaatctatttttaataagctatctgttcaaattttcgcgatcgcttttgttggtatcactattcaagcagtttgcctgcatcggcttcaccctcacttcggcatcagggaaaatctggtgcacctgcttcgtcagttcggccagaatgatctcgctggccccttcgagtccttcaacattacgcttgtcataaaccagttctacgaacatacgtgtttcgctaataactgtttgtatatacagtatttttgctttggcggttttgtctgtcaaggcatgaaccacttgtttttaaattttggggaacatactgcgggcgtgtttgttatcgattttccctgcagggctgatggggtctggcgttgactaaaattatgtgtggggcatggatggggcaaaagtggtctgtgaagttcgttaaagttcgttaatcaagcttcatctcgatctcgctcatcccttgtttaaagcgctcctggacgatctttatcgattttaaaaactatgagtacatattataaaaatgtagcaaataggccgtttgtgcctgaaaagatgaacattctgcgtagcgcgatttgcgcaacaggaatagactggagtcgacactctacacaaagatgcgaaaggttttttatgacacaacagccacaagccaaataccgccatgactatcgcgcgccggattaccagattactgatattgacttgacctttgacctcgatgccgaaaaaaccgtggtcaccgcaataagccaggctgttcgtcatggcgcgcctgatgcgcctcttcgccttgatggggaagatttaacgctggtatctatccacgtcaacgatgcgccgtggacagcatataaagaagaagagggcgcgcttgtcatcagcgacctgccagagcgttttacgttacgcattgtcaacgagataagtccggcggcgaatacggcgctggaaggattgtaccagtcaggcgatgcgctctgtacccagtgtgaagcggagggcttccgccatattacctggtatcttgaccgcccggacgtactggcgcgatttaccaccaaaattattgccgataaaagcaaatatccgttcctgctctccaatggcaaccgtgttgcacagggcgagctggagaatggccgtcactgggttcagtggcaagatccgttcccgaaaccgtgttatctgtttgcgctggtggccggtgattttgacgtgctgcgcgatacctttaccacccgctccgggcgtgaagtcgcattagaactgtacgttgaccgtggcaatctggatcgtgcgccgtgggcaatgacctcgctgaaaaattccatgaaatgggatgaagcgcgttttgggctcgaatatgacctcgacatctatatgattgtcgcggtggatttctttaatatgggcgcgatggagaataaaggtctcaatatctttaactccaaatacgtgctggcgcgaaccgataccgcgacggataaagattatctcgatattgagcgcgtgataggccatgagtatttccacaactggaccggcaaccgcgtcacctgccgcgactggttccagttgagcctgaaagaggggctaaccgtgttccgcgatcaggagtttagctctgatttggggtcacgcgcggtgaaccgcatcagtaacgtgcgtaccatgcgcggtttacaattcgcggaagacgccagcccgatggcgcatcctatccgcccggataaagtaatcgaaatgaataacttctacaccctcaccgtttatgaaaagggcgcggaagtcattcgcatgatccacacgttgctgggtgaggaaaatttccagaaggggatgcagctttattttgagcgccatgacggcagcgccgcgacgtgtgatgacttcgtacaggcgatggaagatgcttctaatgtcgatttgtcccatttccgccgctggtacagtcagtccggcacgccgattgtaacggtaaaagatgattataatccggaaaccgagcagtacacgttgaccatcagccagcgcactccggcgacggcggatcaggcggagaagcagccgctgcatattccattcgccatcgaactgtacgataacgaaggcaacgtcattccgttgcaaaaaggcggtcacccggtcaacgccgtgctgaacgtcacgcaggcggagcagacatttaccttcgataatgtttacttccagcctgttccggccttgctgtgcgagttttcagcgccggtgaagctggaatataaatggagcgatcagcagttgacgttcctgatgcgccatgcgcgcaatgatttctcccgttgggatgcggcgcaaagcctgctggccacatacattaaactgaatgtggcgcgtcatcagcaggggcaaccgctatcgcttccggtgcatgtcgctgatgcgttccgcgcagtactgttggatgagaaaatcgatccggcgttggccgcagaaattttaacgctgccttcggccaatgaaattgcggagctgtttgaggtcattgacccgatcgccattgcgcaagttcgtgaagcgctaacgcgtacgctggcggcagaactggcggatgagttcctggctatctataacgccaatcatctggatgagtatcgtgttgatcacggcgatatcggtaagcgcacgctgcgcaatgcttgcctgcgcttcctggcgtttggcgagacggagctggctaatacgctggtcagcaaacagtatcgcgacgccaataatatgaccgatgcgctggcggccctgtctgctgctgtggcggcgcagttgccgtgccgcgatacgctgatgcaggagtatgacgataagtggcatcaggacggcctggtgatggataaatggtttatcctgcaatccacaagcccggcggaaaatgtactggaaaccgtacgcggcctgctcaaacaccgttctttcagtatgagcaacccgaaccgcatccgttcattaattggcgcgtttgctggcagcaacccggcggcgttccatgcgcaagacggtagcggataccagttcctggtcgagatgctgaccgatctgaatagccgtaacccgcaggtagcatctcgcctcattgaaccgctgattcgtctgaaacgttatgatgataagcgtcaggagaaaatgcgtgcggcgctggagcagttaaaaggactggagaatctttccggcgatctgtacgagaagataactaaagcgttagcctgacagtatccgttataaagaggtaagacatgcccggtaagcgttagcgctgccgggcatttttttgccggacgatgacgcttcctggcgaaacgtgaagtgagaatgaaggaaaacgattgctatttattgccgtaggtcaattcccttttgccttgttatcgcccataatacgcccccggtttgcacaccgggaatccaggagagttcatgtactatcccttcgttcgtaaagcccttttccagctcgatccagagcgcgctcatgaatttacatttcaacaattacgccgcattacaggtacgccgctggaagcgctggtgcgccagaaagtaccgacaaagccggttacctgcatgggacttacctttaaaaatccactggggctggctgccggtctggataaagacggggagtgcatcgacgcgttaggcgcgatggggtttggctccctggaaatcggcaccgtgacgccgcgcccacagccgggtaacgataagccgcgtctttttcgtctggtggatgctgaaggtctgatcaatcggatgggctttaataatctgggcgtcgataacctggtcgagaatgttaaaaaagcccattttgatggtattctgggaattaacatcggtaaaaataaagatacgcctgtcgaaaatggcaaagatgactacctgatttgtatggaaaaagtctatgcttatgcgggttatatcgccattaatatttcttcgccgaatacgccagggctacgtacgctccagtatggcgatgcgctggacgatctgttaactgccattaaaaataagcaaaacgatcttcaggcgatccaccataaatatgtgccggtggcagtaaagatcgcgccggatctttgtgaagaagaattgatccaggttgccgatagcctgcttcgtcataatattgatggggtgattgcgacaaataccaccctcgatcgttctctggtacaaggaatgaaaaattgccagcaaacggggggattaagtggccggccattacaattaaaaagcacagaaattattcgccgtttatcccaggagttaaagggacaattgcctattatcggcgtcggcggcattgactcagttatcgccgcgcgcgagaagatagcggcaggagctacgctggtacaaatttattccggctttatttttaaaggcccgccattgattaaagaaatcgtaacgcacatctaaactttaccctttatcagacaaccagggctttatttccggcgctggttgttttatatttctccactgttgcttatttagacattttaggcttttattattggggtaataaacgaagcggcaaaaggacaatgctgttacgagttgcttaaaagcgggagagaggtaatgcgaattaaacctgacgataactggcgctggtattatgatgaagagcacgatcgtatgatgctcgatctcgccaatggtatgctttttcgctcgcgcttctctcgtaaaatgcttacgccggacgcgttttgcccgaccggtttttgtgtggatgatgccgcgctctatttttcctttgaagaaaaatgccgggatttcgaattaaccaaagagcaacgcgcggagctggtattgaatgcgctggtggcgattcgctatctcaaaccgcagatgccgaaaagctggcattttgtagcgcatggcgaaatgtggaccccgggaacgggcgatgccgcaagcgtctggttaagcgatacggcggaacaggttaatttgctggtcgttgagccgggagaaaatgccgcgttgtgtctgctggcacagccgggcgtggtgatagcaggccgaaccatgcagcttggcgatgcgattaaaattatgaacgacaggctgaaaccgcaggttcactgtcacagtttcagccttgaacaagcggtttaattttccagtcgtaacgcggtcttaggcacgcagctacagctcagaatcgtaccatcgtcacccatagccgattttttcagcggacttacttcgccttccagcaaacgtatccggcagcaaccacagataccagcccggcaagaatacggaatacgaatcccctgattctccaactgttccagtagtacctgttgattattcccgcagaaggtttgcccctgccagtcgatggttacactcgcgtccgggtgtttctctggcgtaacgctgttgtcgaccgttgtggcgccataagcttttgccggggctgtcgccagaatctccacctcatcgccgacgcgaatgacgccgctattgcgggcaatcagattctgaccgaaatccacatcgccattgtccagggcggtacgaaaagcttgcagtgtcgccagcggttctccggaaggatgtttttgccccttttcagggctgacggtcgtaaaaatacagcggctacagggcttcacgacgtcaaaaatcacatcgccaatgcgaagcactttccagctatcttcctcccaggccgctacgccggaaaccactaagtttgggcgaaattgttccatttgtacgcctgccggacaacgctgttgcagatcgcgcagcgaggcttcgttggtcaataaatacgggtagccatcggcaaatcccagcggcaccgcgttatgtcgtttgacccggcgtgtcaactgcggcccaacccagcgcaactggacatcgcgggagaaaaagccgctcaaccattgattaatcgccgtcggggcgacgcgagcggtaaaatggtttccccagacctcggtcggcgcatcctgcggggtgaaatccgtaaagcgaaccagcgcgctactgccgtctggcgcggtcaaatgaaggccgtcgtgtaagggagagggggtaaaacgtaccatttgtggaaactggcgggcggtaataaatgtgccgtcaggctcggtcaccatgaagatgcgatcaaaagccaggccgctgatatctgccagcgcatgagtcaggccaatgccgcgcatggatttgaccggatgaataaagagccgtgataacgtcgccaccgtacagtccctcaaatgaaaataagccttcaactttatgacatgggcgtgagattagctataatgcgcaacaattttcttagcgtaaaagtgacaatatgaattctctgtttgccagtacggcccgcgggctggaagagctgttaaaaactgaactggaaaaactgggcgccgtagggtgtcaggttgttcagggtggggtccattttcagggcgacacgcggcttatttaccagagcctgatgtggagccgcctggcctcgcgtattatcctgccgatgggtgagtgcaaggtctacagcgatctcgatctttacctcggcgttcaggcgataaactggacagagatttttaatcctggcgcgacgtttgcggtgcatttcagcggcctgaacgacaccatccgtaatagtcagtatggcgcgatgaaagttaaagacgcgattgtcgatgcgtttacgcggaaaaatcttccgcgtccaaatgtggaccgcgaatcgccggacctccgtattaacgtctggctgaataaagaaactgccagcattgcgctggatctcagtggtgatggcctgcacctgcgcggttatcgcgatcgcaccgggctggcgccaattaaagagacgctggcggcagcgattgttatgcgttccggctggcaaccaggtacgccgctgctcgaccctatgtgtggttcggggacactgttgattgaggccgcgatgtgggcgaccgatcgcgcgccgggcctgcaccgtggtcactggggatttagcggctgggcacagcatgacgaaactatctggcaggaagtgaaagccgaagcgcagacccgggcgcgtaaggggctggcggagtattcctctcatttctacggttccgacagcgatgcgcgcgtcattgagcgggcgcgcagcaacgcccgtcgcgccggtatcggcgagcttatcacctttgaagtgaaagatgtggcgcaactgagtaatccattgccgaaaggcccgtatggtacggtgatcagtaacccgccttacggcgaacgtctggacagcgaaccggcgctgattgcgttgcacagcctgctgggccgtaccatgaaaaatcagtttggcggctggaacctgtcgctgttcagcgcttcgcccgatctgctgggcagcctgcaattacgtgccgacaaacagtttaaagccaagaatggcccgctggactgcgtgcagaaaaactatcatattgcggaaaccacggcggacagtaaaccggcgacggtggcggaagattacgctaatcgcctgcgtaaaaatcttaaaaagctggagaaatgggcgcgccaggaagggattgaatgctatcgcttgtatgatgccgacctgccggaatataacgtggcggtagaccgttacggcgactgggcggtgattcaggaatatgcgccgccgaaaacggtggatgcgcaaaaagcgcggcaacgtctgttcgatattattgcggcaaccttgtcagtgctcggtattccgccgaataaactggtgttaaaaacccgtgaacggcaaaaaggaaaaaaccagtatcagaaaatgagcgagaagggcgagttccttgaggtcagcgaatataatgcgcgcttatgggtaaatctgacggattatctcgacaccggtctgttcctcgatcaccgtattgcccgcagaatgctgggagaaatgagcaaaggcaaagatttcctgaatctcttttcttataccggcagcgccagcgtacatgcgggtctgggcggcgcgcgcagcaccacaacggtggatatgtcccgcacctatctggagtgggccgaacgtaatttgcgtctgaacggactgagcggccgcgcgcatcgcctgattcaggccgactgcctgggctggctgcgcgaggcgaatgaacagttcgatttgatctttatcgatccgccgacgttctctaactcaaaacgtatggaagagtcgtttgatgttcagcgcgatcatgtcgcgttaatgaaagatttaaaacgcctgctgcgtaaaggcggcaccatcatgttctcaaataataagcgcggattccgtatggatctggaagggctggcggaactggggcttaccgcacaagaaattacgcaaaaaacgctctccccggattttgcccgtaaccgtcagattcataactgctggctgatccgcgccgcctgaaaggaaaagtaaatgtcattaatcagtatgcatggcgcatggctgtcgttcagcgacgcgccgcttctcgataacgcagagttgcatatcgaagataacgaacgcgtctgtctggtggggcgtaacggcgccgggaaatccaccttgatgaagatcctcaaccgcgaacagggtctggacgatgggcgtattatttatgagcaggatctgatcgtcgcgcgtctgcaacaggacccgccccgtaatattgcgggcagcgtctatgactttgtcgccgaaggtatcgaagaacaagcggaatacctcaagcgctatcatgagatttcccgtctggtgatgaccgatcccagcgagaaaaacctcaatgaaatggcgcgcgtacaggaacagctcgatcatcataatctgtggcagctggaaaaccgtattaatgaagtgctggcgcagcttggactcgatcctaacgccgcgctgtcgtcgctctccggcggctggttgcgtaaagccgcgctgggtcgggcgctggtcagcaatccgcgcgtattgttactggatgaaccgactaaccatctggatatcgaaactatcgactggctggaagggtttctgaaaacctttaacggaacgattatttttatctctcacgatcgttcgtttattcgcaatatggcaacccgcattgtcgatctcgatcgtggcaaactggtcacctatccgggaaattacgatcaatacctgctggagaaagaagaagcgctgcgcgtagaagaattacaaaacgcggaatttgatcgcaaactggcgcaggaagaagtctggattcgccagggtatcaaggcgcgccgcacccgtaatgaagggcgcgtgcgggcgttaaaagcgatgcgtcgtgaacgcagcgagcgccgggaagtgatgggcacggcgaagatgcaggtcgaagaggcgacgcgctccggtaaaatcgtttttgagatggaaaacgtcgattaccaggtagaaggaaaacaactggtaaaagatttctccgctcaggtacagcgcggcgacaagattgcgttaattggcccgaacggctgcggtaaaaccacgctactgaaactgatgctgggacagcttcaggctgacagcgggcgcatccacgtaggaacgaagctggaagtcgcctacttcgatcagcatcgcgccgaactggatccggaaaaaaccgtgatggataaccttgcggaaggcaagcaagaggtgatggtaaacggtaagccgcgccatgtactgggctatttgcaggacttcctgtttcaccccaaacgggcgatgacacccgtccgtgcgctttccggcggcgaacgtaaccgtctgctgctggcacgactgttcctcaagccgagcaatcttttaattctcgatgaaccaacgaacgatcttgacgtcgaaacgctggaactattagaagaattaattgatggctatcagggcacggtactactggtcagccacgatcggcaatttgtcgataataccgtgacggaatgctggattttcgagggcggcggcaaaatcggacgttatatcggcggctaccatgatgcgcgtgcgcagcaagagcagcatctggcgacgaaacagccgatggcgaaaaaaaatgaggaagttattgcccctaaagcagaaattgtaaaacgtggcagtagcaaactaagctataaactgcagcgcgagctggagcagttacccggtcagcttgaagacctggaagcgaagctggaagcgctacaggcgcaggttgcggatgcggccttttttagccaaccccatgagcaaacgcaaaaagttctggccgatttaagtcaggcggagcaagaacttgagcaagccttcgaacgttgggagtatcttgaaggcctgaaaaacggggcataacgaaaggagcgcctatgtgtgaacatcaccatgctgcgaagcacatattgtgcccgcaatgtgacatgctggtggctttaccccgcctctcgcatgggcaaaaagcagcatgtccacgatgcggcgcaacgttaacgaccgagtgggacgcgccccggcagcgtcctaccgcctatgcgttagcggcactatttatgttgctgctttctaacctttttcccttcgtgaatatgaatgtcgcgggcgtcaccagcgaagtcacgcttctggaaatccccggcgtcatgttttctgaagattacgccagcctcggcacgttctttttattatttgtccaactggtgccggcattttgcctggtgaccattctattacttgtcaaccgcgccagtctgccgttgtcggtaaaaaaaacgctggcaaggatctttttcctcctcaaatcgtggggaatggcagaaatatttctcgccggggtgttggtcagttttgttaagctgatggcttacggcgatatcggcatcggcagcagctttattccctggtgcttattttgtctcgttcaactgcgggcgttccagtgtgtcgatcgccgctggttgtgggatgatatcgccccgcagcctgcactggcgcagccgttaacgccggggattaccggtatccggcagtctttgcgttcttgcgcctgctgtacggcgatcctgcctgcggagagtctcgtctgtccgcgttgccatacgaaaggctatgtccggcgtaaaaacagtttgcagtggacgctggcgttattatttacctcgatcatgctttatctgcccgccaatattttgccgattatgattaccgacttactgggctcgaaaatgccgtcgaccattctggctggcgtgattttgctgtggagcgaggggtcttatccggtggcggcggttatctttctcgccagtattatggtgccgacgctaaaaatgatcgccattgcctggctttgttgggatgcgaaaggccacggtaagcgcgacagtgaacggatgcattttatttatgaagtagtggagtttgtggggcgctggtcaatgattgatgtctttgtcattgccgtactctctgcgctggtgcgtatgggagggttaatgaatatttatcctgcgatgggtgcgttgatgtttgctttagtcgtcataatgacaatgttttctgcgatgacctttgatccgcgtctgtcgtgggatcgtgagtacgaaccaggccatgaggagtcctgatagcatggaacctaaaaaaggggaagccaaagtacaaaaggtgaaaaattggtcgcctgtctggatattcccgattgttactgcgcttatcggagcctggattctgttttatcactacagccaccagggaccggaagttaccttaatcaccaccaatgcggaaggcattgaaggcggaaaaacgacgatcaaaagtcgcagcgtggatgtcggcgtggttgaaagcgcgacgctgactgacgatctgacccacgtacaaatcaaagcgcggctccattccggtatggaaaagttgctgcataaagactcggtattttgggtggtaaaaccgcaggtggggcgtgaaggcatcagcgggcttgggacgctgctatcaggcgcgtatattgaactacaaccaggaagtaagggcagtcagccggaaagctatcagcttcttgactcaccgccgttggcgccgcccgatgccaaaggtattcgtgtgattctggacagcaaaaaggccggtcagctcagtcctggcgatcccgttctgttccggggttatcgggtaggatccgttgaaaccagctctttcgatccgcaaaaacggacaatgagttatcagttgttcattaaggcgccaaacgatcgattggtcaccagtaatgtccgattctggaaagatagcggtatcgctgtggatctgacatcggcgggaatgcgcgtggaaatgggatcgttgacgacgttgtttggcggcggcgtgagttttgatgtgccggaaggacttgagcaggggcaacccgtcgccgaaaaaacggcgtttaatctctacgacgatcaaaaaagtattcaggattcgctgtacaccgatcatatcgattacctgatgttctttaaagattcggtgcgcggattacaacccggcgcgccgctggagttccgcggtattcgtctggggacggtaagcaaagtgcctttctttgcgtctaaaatgcgccaggtatttaacgacgattaccgtattcctgtgctggtgcgcattgaaccggagcgtctgaaagcgcaattgggagaaaatgcggatgttggcgcgcatttgacggaactgcttaagcgcggtttacgcgcttcgcttaaaaccggtaacctggtgaccggggcgctgtatgtcgatctggacttttatcctaaggagccgccgattaccgggctacgcgaatttgatggttatgaaattattcccaccgtcagcagcggtctggcgcaaattcaacagcgactggtggaaacgttggataagatcaacaacctgccgttgaatccgatgattgaacaagcgaccaatacgctgtctgaaagccagcgtactatgcgtcggctgcaaaccacgctggataatatgaacaagattacctccagtcagtcgatgcagcagcttccggcggatatgcaaacgacgttacgcgaacttaaccgcagtatgcaaggcttccagcctggatcggcggcgtataacaaaatggtggcggatatgcagcgtctcgatcaggtgcttcgtgagttacaaccggtgttgaaaactctgaacgagaagagcaacgcgctggtatttgaagcgaaggataaaaaagatcctgagcctaagagggcgaaacaatgaaaaaatggctagtcgtgataatggcgttctggctggcgtcatgtagctccggcggagagaataaaagctattatcagctcccgatagcgcaaagcggtgtgcaaagcaccgcaagccagggcaaccgtctcttatgggtagagcaggtttccgtacctgactatctggcaggtaacggcgtggtgtatcaaaccagtgatgttcagtatgtgattgccaataacaatctgtgggccagcccgctggaccagcaattacgtaacacgctggtggcgaatcttagcgcccggcttcctggctgggtcgtcgcttcccagccgttgggaaccacccaggatacgttaaacgttaccgtaaccggattccatggacgctacgatggtaaggttatcgtcagcggggagtggttattaaaccacaatggacagctgattaagcggcctttccatatcgaagccagtcagcagaaagatggctatgatgagatggtcaaagtactggcaagcgcatggagtcaggaagcagccgctatcgcagatgagataaagcgccttccctgagataaaagtaatgtaaatttaaccgcttcaggtcgtgcgcctgaggcggtttttttatttttgacgccggaaaaatagttgttatggctcacattttttgtacaaatgatttaccgtatagctcacaaatatgacattggtgtgaattttgcgcattgacgggcgatccatttagaggtattcgtgtagtgtgattgcacattttgtaatcactgttttcttttccaccagatacaaatatgagggaaacgaggcatgaagagacaaaaacgagatcgcctggaacgggcacatcaacgtggatatcaggccggcatcgccggacgatcaaaagaaatgtgtccctatcagacgctgaatcaacggtcatactggttgggaggttggcgacaagccatggaggacagggcggtaatggcctgattctgtctctttagaaaaagaaacctccgcagtgcggaggtttcgcctttatgggctttgcaagcatgataccgatagcgcggaatatcaattcaacacttagaacgcggaagtatcctggaacaaaccgactttcaaatcgtgtgcggtatagatcaggcgaccatccaccagaacctcaccgtccgccaggcccatgatcaggcgacggtttacgatacgtttgaaatgaatacgataggtgactttcctggctgtcggcagaacctggccggtaaatttcacttcgcccacgcccagagcgcggcctttgccttcgccgcccaaccagcccaggtagaatcccaccaattgccacatagcatccagacccagacaaccgggcatcaccggatcgccgataaagtggcatccgaagaaccatagatccggattgatatccagctcggcttcgacatagcctttgtcgaaattgccgcccgtttcggtcatcttaacgacgcggtccatcatcagcatgttcggtgcagggagttgcggccctttagcgccaaacagttcaccacgaccagaggcaagaaggtcttcttttgtataggattcgcgtttatctaccatgttttatgtaaaccttattttattgaagcacgcaggatagctaacacgtgtacgctgaacaagtccgatcagttcggaataaaagcgttcagccaacgtaatggccacgggaaacgatgacggccttcctgttgcgtcgcctgcgcgatacgctcctggatagtctgcatcaacgtcgtttgaccttcgccatcccacaccagatttaacagtagcggtaaggcgtcggtcacgtcgtctaccgcccagatagtgaacttctcttctttaaccgcttgcagcagttcagatttaagactgagatggcggacattggcggcagggataatcacgccctgtttaccgtttaattcccgctgctcgcagatggcgaagaaaccttcaattttttcgtttagcccgcccaccggttgcgcgcgaccaaactgatcgaccgagccggtaatcgcaatattttgattcactggcacattggccagtgcgctgatgagcgcacataattccgccattgaggcgctatcgccatccacttcgctgtaggactgctcaaaggttaacgaggcagagaagggaatttgttgctccagctgcaactccgacatcaggaaggcctgcataatcatcattcccttagcgtggatatttccgccaagttcggccttgcgctcaatatcattaaattcgccatcgccgatatgcacaacacagctaattcgcgacggttcgccaaaggcgcgaggatgcccgggaaactcaatgacggaaagcgcattgatttgtccaacgcgttcgccttcggtttcaatcaggatctgctcttgcagaatctcatcctgcatccgttccgccagaaagccttctcgccattcgcgtcgggcaagcatcagactgagcgcttctgcgccgcaggtatcgccttcgcataaaggcgatgcctccttaaactggcgggctatccacagtgggcaaagaggcagcgtatcctgttcgccggtatagcgcacagcctcgcgtatcagaacgggccaggcatccggtgccgggggcggcaaattatcgcgtaaagcgatacgcgtcacccattgacaccacagggtcatagcttctgcgtccgctatctgtaaattgtcttcaaattcactgtagatagcctgttccgcgagctccggttccatctcctgaaaatcagccagtgattcacgttcgccaaccagaatcaccttcagtttgagcggcattgatggcacggagaccggtaatggacgcgactcgtcaaaggccacccagtcaaaacgctcgcggctaacgatggctttcagacgcatccatagtaacggctgcgccagaagggttcgtaaggaaataatcagcacgccgccgtttgcctgatgaaccagtcccggctgcagggtaatgtcgccgttatactgccgcaggcaaccaaagagctgttcggcttcgacccagtccgcgctgacgacttgtgtgacggtggcaaagttgtcttgcgcattctgcgcggcgcggtaatgaacagtatgcccggaaacgtcataatgtccgccggttaattgtccggcatcggtttgcagagcgcggacggcatctgaaagtaaagtgagatactcttgctcttcaggcgctttagtcagcataaaagaggatgatgcccacggctgtataagttgctcaagcgcaaattgcagtcgtggctgagtatcactgagtaaggtgtcgttttcgtcagtcgcgtgtggctgtgcaaatatctcctgatagctttcgctatccggaaccagatcacgccatgcaagtttcgtaatggtcaaagttgaggttttttagtctgttgtaaaaggggggattatagcctaacccgtcacgctgcacacgcggaaagcgaatgcaaagtaatatgaagacgtgtaaccattcacaggttcgagattcttttcttcagatggctaaaaaactgatattctgataacagttacacggtaacattgggatcacaatgaaatatcaacaacttgaaaatcttgaaagcggttggaaatggaaatatctggtgaaaaagcaccgcgaaggggagctgatcacccgctacgtggaagccagtgctgcccaggaagccgtcaatttgttgttggccctcgaaaatgaaccggtgcgggtaaatgtctggatagacaggcatatgaatcctgccttgcttaatcggatgaaacaaaccattcgggcaagacgcaaacgacacttcaatgcggaacatcagcatacgcgcaaaaaatctatcgatttagagtttatggtctggcagcgtctggcgggccttgcgcagcgacgcggtaaaacattatccgaaacgattgtgcaactgatagaagacgcggagcataaagagaaatatgccacgcaaatgaccacgttaaagcaggatttacaggcgttattaggcaagaagtaacgctgaaaggcgttgtcatccagaccagagcaaaaaaccccgcgacgcggggttttttatcagacggaaacttaagcctgcggctgagttaccacgtctttaacgcctttaacttcgatctctacgcgacgatccggagccaggcaatcgatcagggcagcgcgaggtttcacgttgtcacaggtgttgccggtaaccgggttagattcgcccataccacgtgcggagattttgtcagacggaatacctttggagatcaggtaatcaacaacagactgagcacgtttctcggacagaccctggttgtaagcgtcagaaccgatacggtcagtgaagcccagaacgacaacggaaccgtctttcggatccaggttgctcagctggctgtacagctgatccagagcctgctggccttccggcttcagggtagatttgttgaagttgaacagtacgtcagacttcagagtgaagtgcttggtctgtacttccggagccggagctggtgccggagctactaccggagcagcttcttgctggccgaaacggtaggaaacacctacgctcagcaggccgttgtccggacgggtgccgatggtgttggcatcaccgatgttgttagtccactggtattccagacgggttgcgatttcaggggtgatagcatactcgataccgcccgcgaataccggggaaacgccggtgtcgtggtctttagtagacgggccgccagggacgttagacttggtgtctgcacgccataccataccacccagacgggtataaacgtccagatcgtcagtgattggataacccagtttagcggtcaactgaacgccctgagctttataagcgccattgatgttgtcgcctttgtacggcatacggcctaaccagtcgtagcccatttcaaagccaacatacgggttaacctggtaaccaccaaaagcacctgcgcccagttggttttcatgagtcgggccatcattgtgaatgaagccggtgtcatggtactgagaccagcccagtttagcaccagcgtaccaggtgttatctttcggagcggcctgcgctacggtagcgaaaccagccagtgccactgcaatcgcgatagctgtctttttcattttttgcgcctcgttatcatccaaaatacgccatgaatatctccaacgagataacacggttaaatccttcaccgggggatctgctcaatagttactctaccgatatctacggcttatgctgagcacccctggcgatgtaaagtctacaacgtagttggaaacttacaagtgtgaactccgtcagacatgtgaaaaaaacatgacggatatacacatcatttaacagtttcagatgataaatcgtacagcaaaaattgcggaaaccgcttctgacaagcgttctcgcaaaaaaaacgttagcactcaaaggagatacgttcgcgtaaaaaaaagtccaggataaatcctaattttacttaatgatacaaattagagtgaatttttagcccggaatgctgtctcctgggtaaagcgtgcgcacgtacagggcgcatgataaaccctaccgcattacctaccttcgctgcttcaaccaggctggcatgttcttcttctgtcagttcttcagtcatccaaccaattaccacgctgtaatttcctgtacgcaaagcgcggatcatcgactccagcgtatgacgaggcgcaagctggctaatttgcatcactttcgttaatggcaaacctgaagactgtacccattcacggctgagcttttgctgcggcgtgagccagagctgccatcgtgattgttggcctaactgacggagtaaaggcaaaagcaggagttgcgccatcatgggctggtcttcgtggtagacaacttcactgaccagtcctgccgcggcattttccgtagcggtgcgcgcagcgttgtgggtagtggtaggaaatgacgaagaacgatttgcataacctgaagtgtacataatcaatccagccctgtgagttactgtatattcatacagtacccctgtggcgatgaaagatcaactctattttcggaaactgtctcgcaatttttattcttagtggcgtcaaaaataaaaatcatcttgctcgcggagtataagttgcctattttcgtcattaacggatccgttactgcaaattattcttttactttatgatttaaaaggaattttatgagagcactctcttatgacaggatctataaatcgcaagaatatttggcctctttggggacgatccagtatcgatctttattcggtagctatagtctgaccgtggaggataccgtctttgcgatggtggctaatggcgagctttatctccgcgcctgtgaagaaagcgtaccctactgtgtgaagcatcctcccgcctggctcatgtttatgaaatgtggacgtcccgttatgctcaactattaccgggtggatgaaagcctgtggcgcgatcagcagcagctggtgcgtttatcgaagtattctcttgacgcggcaatgaaggaaaaacacagccgtattttacagcacagactcaaagatctccccaatatgaccttccatctggaaacattgctcaatgagtcagggataaaggacgaaaatatgttacgcatactgggcgcgaaaatgtgctggctaaggttgcgacaaagcaatcccttgctgacggtgaaagttttgtatgccctggaaggcgcaattgtcggcgtacatgaagcggcgctcccggcgagtcgtcgccaggagcttgccgactgggctcattcgcttacggctgggtaattaatgtagaaatcggcggtgaaatttgccgttgcaagcgtccaatctcgggcagtaaggcaatgagcaaaccaatttgttgaacaaccagaggttctttgctgtccggacgtgtttccagtgactgaactcgctgctttaaaccctccagcgcctggtgtacgcgctgttcgtcttcaggttgatgatgaagcgcatcatcaacgtagcagaccgcgtcatccagaagccccaacacgtccggattactgagcttttcgcggtgcgcgccgagggcggagatatagctggtaaaagtgtgattgaggcaaagcagcctgaacgccgcctcccgggtttcagccgtgacgtcgggttcgctcgacatattagaaaccacggatgccagttctgcatcgcggttgtgcgcgtcgcgtctggcaatgcgataggccaggcggttatcccgtccctggtgatattgctcaaggatcgcatcaaggtagcggcaattagcatcggtggcgcgctggagtacccggggaaggttgcgaaagcgccagtccggccaaataaagctgaccgcagcccaggcgatagcgcagccaattaacgtgtcgacgacgcgcggtaacgctacctcgaagccttcgcccaggaggttaaagcagagtaataccagcagggtgatgaacatcgtcgcatgggcatactgcacattacggaatgcgaagaaaagcacgccggtaatcaccagcagaactaactgtccttcaagcgaaggaacaaaccataaaatcggcaggccgatagcaacgcctaccaacgtgccgataatcctgagcgcaaggcgatggcgggtcgcgttatagttaggctggcaaacgaacaggctggtgagcaatatccagtacccgtggcgcatcccggtaatttggatgagagcataaccgatgcacaataccagcgacatgcgtaccgcatggcgaaagagagcggactccggggtaaaattacggctcagacgcagccagatgtcgctaaacccgtgcaggctatcatcagccaactggttttctgactcattgcgcggcattgcctgggcctgctccgactcgatcgtcgctagttgcgcatcaatagcgcgtaggttggttaataagaatccaagcgtattcagcagctctaaagaagcgccgctggcgcgcatacgttcaagcgcggcgtcaatgtgggtaaagacgcgttcaaagcgcggatcatgctggtacggcgtacgcagtaagatacagcgcgccagctgcgtacaggcctgcgcctgcatcgacatcagacgctgaaagcggaacatgacgtcgctatggcgaaaataatcgcgcagcgtctggtattgaatatgcgaagaactggcgcgttcatgaatatcctgcgccacaaaatagtaatggagggtgcggcgcgtaccgcgttgaccgcgatcgccgcgcaggcgagtcaacaacgacactttcgtttggttcagcgtcgccattaactgcccgttcgctaacgctaaatcatagagcggcgcctggctttcatcttcaatatcaggatcaaacagacgtgatttcagttccagatagtgcgctaactgttcgtaactgcgtgccagattatcctgcaacggacggatcggaaatagcagatgcccggttagcgtcagtaggttataccatactgcgcctgccagcaggagcagtggttgctgataccagtgatcgtataaagaggtacccagcatcgtatagatggcaatgagtaacgcgccgaacgcgatggtggcatagcgttgccccagtcctcccaacagaataaacccgctggtggataacgttaagcccaacgcaaatagccacggccagggaaagagcagctccacagaagccgacgcgataaaaaagcaaattaaggtaatgattaaattacgcaagcgtccggcaaggcgatcgtcgagatcggttagcgccgcggcaaccataccgagcgtgagcgggatggtaagtttgacgtcgcccagccaccagggcagggcggtggtgccgcacagagcgataaaaatgcggatgtaatacagccaggtactgttccaggtataacggcgaatcaacggacttaacataaaggctatttgtcccgatcattcaaaacggcggcgcgcgttagcttctcgcgcggcgcgagcggtttctacagagacgacgcggcgaccgacaggccaaagcgcaatcgcggcaattttaaagttcgcaataccgacaggtatcccgatgatagtgacacactgcgcgataccggaggcaatgtgcatcaggcatagccaccagccgaaaaaaagtaaccagaaaatattcagcaaggtaccgccagtattcattaatacgctttttgccgccggattaagttcgtcaacgtgaatggcttcattaccgtaagggaacagggacagtttggttatctcccagcaggagcgggtcaacggcagggtaaaaataagcacaatactgaccagcgtcgccagcagccaggccagcgtagtggcaaagccgcccagtacaaagtttaaaatattcagaacggtacgcataaaccctcagttcattccggttttctatcactgcgggcaattgtaacgtttttttagactggagcacgttttctctggcggttacactgataagcacatctttacgtctggattcgctgagtcatggaactgaaagcaacttctcttggaaaacgtctggcgcaacacccgtatgatcgtgccgagatcctcaacgctggggtgaaagtgtctggcgacaggcatgaatatcttattccattcaatcagttattggcgattcactgtaagcgtgggctggtatggggcgagctggagtttgtcctgccggaggataaagtcgtgcgtttgcacggtaccgagtggtcggaaacccagcaattccatcgctatctggacgcgcactggcgtcgctggagccaggagatgagtgatgtcgccgcgcaggcattacaggagcaatgggcgcgtattagtgagcgaacgggcggaaaccaatggcttacccgtgaacgcgttcgggggctggaacacgaaattcgccagacgtttgccgccttgccgctgccggtctcacgtctggaggagtttgctcactgtcgcgagatatggcgtaagtgtctggcatggttacaggatagcgagggtagtcggcagcagcataatcaggcgtatgctgatgccatgctggaagcgcatgccgacttttttacgcagatagaatcctctccgcttaatccttcccaggccagggcggtggttaacggcgaatcatcgttactggtactggcgggcgcgggaagcggtaagacctcggtgctggtggcgcgcgcgggttggctgttggcgcgcggacaagccgatgcggggcaaattcttttactggcgtttggtcgcaaggcggcagaagagatggatgagcgtatccgcgagcgcttacatacggaagagattactgcccgtacgttccattcgctggcgctgtatattattcagcaaggcagtaaaaaagcgccggttgtcagtaagctggaaagtgacgccaccgcgcggcatcagctatttctgcgcacctggcgtcagcagtgtagcgagaaaaaagcgcaggccaaaggctggcgtcagtggctggaagaggagatgcagtgggtagtgccggaaggtaatttctgggacgatgagacattgcagcggcgtctggcccctcgcctggatcgttgggtcagtttgatgcgtatgcacggcggcgcgcaggcagaaatgatcgctggcgcgccagaggagtgccgcgagctgtttggcaaacgcattaagctgatggcgccgctgctaaaggcctggaaaagcgcgttgaaagcggaaaatgccgttgatttctccgggctgatccatcaggcaatggtgatcctcgaaaaagggcgttttatcagcccgtggaagcatattctggtcgatgaatttcaggatatttccccgcagcgggcggcgctgttagaggcgctgcgcaagcagaatagccagactacgctgtttgccgttggcgatgactggcaggcgatttaccgttttagcggggcgcagctctccttaacgacggcgtttcatcagacgttcggcgagggcgagcattgccacctggacaccacgtaccgctttaacagtcggattggcgatattgccaatcgctttgtacagcagaatccgcaccagcttaaaaaaccgttaaatagtctgaccccaggcgataaaaaagcggtgacgttattggatgaaagccagttggacgcgttactggataaattatccggctatgcgaaggaagatgaacgtatcctggtgctggcgcgctatcaccatctgaaacccgcgagtctacaaaaagcggcgactcgctggccgaagttacagatagacttcatgactatccatgccagcaaaggccaacaggccgattacgtgattcttgtcggattgcaggagggtaacgacggtttccccgccccggcgcgagaatccattatggaaagtgcgcttcttcctcaggttgaggattttccggacgctgaagagcggcgtttgttatatgtggcgttgacgcgcgcgcgtgcgcgggtctggctgctttttaataaagataatccctcgcgctttgtggaggcgcttaaacagctggatgtgccggtggcgaggaagccctaaagcgcgggcggtacagcatcccgcccgcgtagcgtttatttcaggcgctcggccagataacgcgcataatccggaataagaatatctacagcgtcattaaaatgcggggactggatgataaagtccgccgttgagacgttagtggcgacagggatattccatacggtggccagacgcagtagcgctttgacatcggggtcgtgcggtaccgcgttaagcgggtcccagaagaaaatcaacacgtcgattttcccttctgaaatgagtgcgccaacctgctggtcgccgcccatcgggccgctcagcatcgcattaacgtccataccggttgcgcgctggatcagattccccgtggtgccggttgcataaagaacgtgtttttccagcaacggctgatggcgttccacccagttcattaacatctgtttgcagtggtcgtgagcaaccaacgcgatatgtttgcgcgtcggcaaggtgcgagtcgtcagttccataattcgattccgtagttaacctgtctacagattactggaagcgcttgatgctgcaagagaaagagaaaaaaattgcgcgctgggacaactcatatcaagagggcggctgtttttccgcccattgcagaaaatgatggcgtgtctgcgggtcggccagtcggaaccaatatttcagccgctgttctgtcagagtttgtgattgcggcggtacggtatcaagctctgagacgtcggaaagtaatgtgctgtcgtctgccatcatcgtggcgaactgaggaagcgaggcgcgtttcgccgatttattataacgctcggtctctatttcataatcgaccactttagccgtagaagtaatggccagaatatcgagttttaccggaatgggcatggcgtcgccgtccaaaagcgccagacgcggcgccgcgttaaaatgcgaggcttcgcgctcgttttccagccgcgggagctggaaattgacctgacttatcagttgggtatcgaaacttatcaccagcggcggagaaatataaagccgctcttcattaccgggcaggcggatggttttttccacccggaaaacgagttgatgcggcccgttttccagttcaatgctctctgcgccgcgtaataaagagctggacacctttttgccgtccagcaccagcagatcaacctcattagacaaacggagcgttgtggcaaaaacagtcaccggcaaacagagagcaaggaaggtggctagcgcgccggttttcataaggttctcctgtccaaaggccgtctggctaataatgtatcgaaatttttcttagatcatgtttactaacatatagacatattttggcgttttgctctcatacatcggtatgggatgaatggttgctatgtcaggtttgtcgtacactttgcaaaacagccaggagaaagatgatgaaagagaccgatattgctgatgttttgacgtccactcgcactatcgcgctggtaggtgcgagcgataaacccgatcgtccaagttatcgggtaatgaaatacctgcttgaacagggctaccatgtgattccggttgcgccaaaagtcgcgggtaagacattgctggggcaacaggggtatgccacgctggcggacattcccgaaaaagtcgatatggtggatgtttttcgcaactctgaagctgcatggggcgtcgcgcaggaagctatcgccatcggcgcaaaaacgctatggctacagcttggcgtgatcaacgaacaggcggcggtgctggcgcgggatgcaggcatgaccgtggtgatggatcgctgcccggcgattgagatccctcgcctggggctggcgaaataaaagtttaaatggccggatatcgctttccggccttttaaatacaatcagttacgtagtcgcggcgcctgaagctgcttgcgaatggtacgcgccagttcatccatcgatggctgttctggatgctcgtcccgcatttcgcttcgcaactgggcctcggccagataagtatgcactggctgaccatcatcatcttccattaccacgtggtaccacggagcggcgcgaagttcgtcgttaaccgccagttcatcaggcgacggctcatcaagcgaatattccgggtcgatatcgacgaccactccgaggtaacctaacagggaatggcggacctgttggccgataccgaatttgctggctatcatagtcacctcccgggaaatagataccctttatatgaggatactattccacttttcaagttacatgacgcgacaggcaaaccctttcagatacagcccttccgggtaggtggcgatcaccgggtgatcggcggcctgacggaactgctctataaattgtacatcacgaccggcatctattgcggcatcggcaatgattttctgaaataaatcgctggtcatcagtccggagcaagagaatgtcagcagtatgccgcccggattgagcagttgaatcgctaacatgttaatgtctttatagccccggcaggcgcccattaactggcttttattttcaacgaatttgggcgggtccatgatgatgacgtcgaatttttcgccgtgttcacggtaagcgcgcagcaacttaaacacgtcgtcgcgcacgaattcggctttgctcaagtccagttggttcagttcaacgttttgcctggcgatatccagcgcatcctgtgaggtatccacgctgacaacctggcgacaaccgcccattaacgccgacacggcaaaaccgccggtataagagaagcagttcagtacccgctgattttccacgtagcggcgcgtcgccagacgactgtcgcgctgatcaagataataaccggttttgtggccgccctggatatcgaccagcaatttcataccgtgttcttcaattggcaaaagcgcaggcggcagttcgccagtgaccggaccttgcgtcagcgccatcccttcttttttccgcacggcgacgtcgctgcgatcgtaaatagcgcaatccggatagcatgtttgcagcgcgctaattaatgcggcgcgttgatattcggccccggcgctgagcagttgcagcaccaaaaaatgaccaaaacgatcgatagtgacgccaggcaggccatcggactcaccggcgatcagacgatagctatccaggccgtcttttttcgccagccagtcgcgccactgctgcgcctggcgcaggcggcgggtgaaaaacgcaatatcaatggattctgctttatcaaatgtccagacgcgcgcgcggatctgggaggctggtgaccaggcgccgcgtgctaaccactttccctgatggtcgacgatatcgatagtttcaccgaggttggctttgccttccagacgggatacggcgccggaaaagacccatgggtggcggcggagtaaagatttttctcgccctttgctgaggactaaacggggatattgcggaaatgtagattcagtcatgcggagtaacctctcacaaacagtgacgcgagccggatgatagttccagcctgggaccgtgaaaacgaaatggcgcgtagggtagcacagatgagaggggcaatcaccagcgtatggcggtgagcgtttctgcacaaaatagaatcgtaaaggcacagtttcttcagcggacgctttttatagtgttatttctttacacgaagaaggaaatacaatgaaaacagtcttctctttgaccgcagccgcaatgatggcattgagtggcggcgtatctgccgcgtcggcgtttagcctcagtagcgcggatattccggcggattttcgtttaacgcaacagcacgtctttaaaggatttggttgtagcggagaaaatatttcgccgcagctgagctggcgcaatccgcctgccggaaccaaaagctacgctattaccgtcttcgatcctgatgcgcccaccggaagcggctggtggcactggacgatggtgaatattcctgcgcagattcacgacctgccgacgggggctgataaaaaaacgttacccgccggagtggtgcagggacgtaatgatttcggttatgctggctttggcggcgcctgtccgccgccgagcgataagcctcatcgctatcagtttactgtgtgggcgctgaatacggcaacactgccgctcgacagtgagtcaagtggcgcgttggtagggtttatgctgaacgcgcatgtgattgcgaaagcaaaattcacggccacatacggaagataaaacagaggacggcacggtgcaggagatgcatattcgacatcaggatcttacgacggcagaggtgcgttccagtcatctgcaccgtttgcatcgtgttacgcttttttccgccgctatctgccatattacgcagggcagtaaagtcatcattcaggatgatagccgccttgtcgccgggcctggcgagttgattattatcccggcgaacacgccgctggagattattaatcagcctgcgcagaacggttttcgctccgacctgttattactttcaccggagattattgctcgctttaaaacgatgtacgttcaggattatccaccggcaaacctgacatcgctgtgtaccccgatgagccgtagcctgacatttatgtgggagaacgtgttggatgctgtgcgccaggggttgcccgttgggctacaggaacatcaggcgatggggttactgttagcgcttttacatgatggcgcggcgggaccactgcttattgaacggcgttacaccctcacggagcaggtgcggcaactgattatgctctcgcctgctaagctatggacagcccaggagatagcccgccgtcttgctatgggaacatcgacgttgcgtcggcgtttgcagcgtgaatcgcagagttatcgacaaattgttgaagaggtgcgcatgtcctgcgcactttctcaactgcaatcgacgacgctgccaatcggcgaaatagcgctacggtgcggctacctgtcggggtcgcgatttacggccagattccgccagcattatgggtgtctgcccagtcaggtacgttaagtatgtcctgtatgagcctccaccgttgattatgaaaggagaaccatcatgtcgaacgtctgcattatcgcctgggtttatggtcgcgttcagggagtcgggtttcgctataccacgcagcatgaggcgcagcggctggggttaaccggctatgcgaagaatatggatgacggaagcgtagaagtggtggcctgtggcgacgcggcgcaggtggaaaaactcatcaagtggctgaaagagggcgggccgcgctctgctcgtgtggacaaaatcctcactgaaccgcacagccctcgcgagacgttaacaggctttagtattcggtattaaatacattttaccggcttgggcagaccggcgattttggtcgcttgctttgccgggcctttcgggaacagacgatacagatagcggctattgcctttttcttcgccgaacttattcgccatcgcttttaccagcattcggatggcgggagaggtattaaactccaggtaaaattcgcgcacgaagcgcacgacttcccagtgttccgcagagagctcaatgccttcattggcggcgatagcgactgccagcgcttcactccactgcgtcgtctctttcagatagccttcgctatcagtactgatttctttaccttcaaagatcaacataacgtttcactgcgtaatcaacacggacggcagtgtagcaaaaaataaagccctgcataagcagggctggaagaggggaatgtcgattagtcgcggctggcgaagcccagaatgctgagcaggctgacaaagatgttgtacagcgaaacgtacagactgacggtcgcacgaatatagttggtttcaccgccgtgaatgatgttactggtttcatacaggatagcgcccgaggaaatcaggataaacaccgcgctaatcgccaggtgcaatgcaggcagttgcaggaaaatattcgccaccataccaatcagcacgacgacgatcccggccattaacataccgcccaggaaagacatatccttacgggtggtcagaacgtaagcggagcagcagaaaaatactaacgcggttccacccagcgccaggccaatgacatcgcccatgcctgctgacagataggcgttaagaatcgggcccaggatatagccgaggaagccggtaaacgcaaaagcagacaggataccgaccggcttattggcggttttataggtcaggaacatcagcccatacataccgaccagcgtcagaatcaggccgggggagggcagcatcagtaccgtactggctgtcgcggtaattgcggataaagccagcgtcaggctcaacagaaaataggtgttgcgcagtactttgtgcgtactcagtagcgagctacgatcacgcgatgatgtaatgatacgatccattagtcactctcttatgacagatgtaattaataaaggagaataataaaaacagtcactgtcacccagtggttttacccatctttacgcattcgtttacgtttagtttccttaagagatttcaggtgattaccgtcgttaaaacggtctgctcatgcctggcgctacgccataaaacaggcggcagcgccaaccacgcgttaccgataaaaaaatcgctaatcacagcggtgaaacagtggaggcgatcaatacgtattcagccagttttgtgttgaagaaatggtcaatgtgccgctatttcaggcaattaacgaaattttgcctgtttttcacgcaaacgaacacattcggtctttacatggcgcaccgggatgtttatagtgcgcctcattccggaagtgtggccgagcggttgaaggcaccggtcttgaaaaccggcgacccgaaagggttccagagttcgaatctctgcgcttccgccagattaaacaaggggttaccgaaaggtagcccctttgtttttttaggcgctatagaatatagttagaaaatactgttagaatatttcccgaaaaaacggactacgcgagtctttagtttcttttcgtttcccgatgtgtctatttattgaagatgtagaccattctgggaggtgaaggatgccccatctctttcagaataatgttggtatattcgacaacagggcctcttggatgattttcttctttatcctgaagatgggtcagggcatgtacaacttcatgaataaatgaacgttttgtgtcaaaaagttgtcttccttcgttactttcataatgttcggtatatgaatcatcagaatcgtccagattgagacaaataactttcctgccttctgaaagtttgaagtgttcctgagccacggtagtttcaaaggcttcgcctgcccccagtagccagcgctgctccacatcatgtagttctttttcatatgcgtaattcatcagtctgcggaatgtttcgctttgggtatacgcattttgaagtacggaggatagttcatcgtagcattcgtcataagtgtcgtcatcaatttctgtatcagggtctattccacccgcgcctgagataaggtactccaccacacactctggctccagacggaattcactgtttatggcaaggctgtcatgagcaaggcgtagccgtgaggggtttggtgcatgttcgggaatatcggggaaaacaggtgtatctgcggtatttaatctatatgtggatactccgctttgaggtattaatctgtaggtgaccggaagcataacttcttatttcctgactacaattatgaattatttaaattaaacaataatagtgtttttagttaatgtgccacatacaggtaacgctatgattcagacaaagccaacaagtaatacgctgaaaatgttatttataatgaaacttaggggcggggtttatttaataaaacaagggggcctctgtttgaatacttcttgtttataaaatccctttatctcgactaaaatatcggatgggggaaaagagttctatcattgtaatccgggagtggagtaggggtatgttgactacctgtcagatcggctcctgttaatgctttcgctaaagttagagctatcttatctaatttcgcaccatttagtttggtgtcagttaagtctgagccgaatagaattgcagcggttaagtttacaccggacatgttagcgcaagtcaggtctgcgtgagtcaggtttgctttagtcatgtttgaacccattagatttacagcgtgtagatttgcacaacacaaatttgcaccgactaaatttacattagatagagttgtttcacggaaatctgcattagaagcatctatttttgacaaatcttccccctggaaatctttatgagccaggtttactccgcgcaggttcagaaaaccatcctcggttataagtgaatcaggctgttgtatattatgtttactcatcagttttaacattcgacatacattccaaaatctctcactatcaactttatccgttacagtttttccatttttgttcacttcaataatgaccatgggatccgtattttcggatgctgctccacatgacagacatatagtacacccgttgacatcctccagaaatattttattaccatcgaagaaagcatttttatttacatataataatgatgtggtcagttttccaattacctcccgaaaccatctttcattgcttcttcttactccaccacaggtaaaaaaattgacaaaccattccagtataccgcgtggtgaagttgcacttttcattgcttctttcgtaccggtaccggccgcatgcaaatatcttaatatattttctggggacgcgttagttattggcattttgattccttcttatggaagtgagccgactccttataggtgtgagtcaagtcacatttatacaaggaataataaaaaaagatataaggtgatttttgtatttagagctttggttgagtatgagtaggtgtctggcatctgacaagaggcgatgatatctgccataacggtgaagcagaagtaatatcacccgtgaataataagattatccttgctattgacttccttcatttccagcatagcttacgcttcatcatcattgaataaacaattaagtttgttgagcgaaaatttacttaaagaaaaaataataagcaccaatattttttgcagtatttcaacttataccagaataaatgcgcgtagatggcgtaaaaacctgatgagcaggaatacttacacactaaaaatgctcccgcaaacagagcaaaatgagagagatgaacgtttgccccttacatttccaccaaagattctggtcttgtctcttgtaaagggcatacgtatcgcgttttatctcattaagaaagtatgttgacgtattaaattatgcataatgctctttcaattgcttcacgtttgaaatgaataattcaaaaccagtgagcgcctcttcttcggtactggtttgcggcaagcgataaagcgccactaaagcagtattgtctgcgtcagcgccgatagtgacggcgctggtgtagttcagacgtaaaaaatgctgcaaagtcaggatgtcgtcaggcaatggcataaagggacagcacatttccagtgtatgatcggattcattaaaataaacctgtatcccatcatcaatgataagcagtggctcatcttctggcgcatccaggcctaacgcgtcatataaacgatttaatagactttccatatagttacctcaagactcaagatgtgattaatgaagaaatgccttttactgactgccaaatattttcatccccaactcgtttttgataggaaagattgagcacctctggcgataaatttttcattactttgtttcccgccccgcccgtattttgtttctgaatctccaggttaccgctattcagtaatactttttggaaaattttctgtccaccgctatccggaagactaccaggcgcacttaacatatgggtctgatgtaaggaaatgatctctcgcttgatttctgaatccatcatccctgtacgatctttgccgcttttacaattccaggcgggtaccgcgtcaatttcatgggctaacatggcaaggcgttgtgcgagtttatagggttcgccgccatctttatgatgttggttatttttccatatatccttaatctggcgcgctaatgtattgacgacctcataattatccgggtattgcgccagccattcgccaacccagccacctggtctggcttcagggcgtaaatcattgcctaataactgatgtagcgcctcggcattatagctatccgatgccttaaggccaaagccgagcttgagcgccagctcattaacacccacattaaatgcggcgacgtccggttttatttttaccgtctgtagatcgccatctttattgcggatttttaaatgaatcatttttcccggctgggtcaacgattgccatgcgcgcatttggtcctcgaccatcgttccctctttgccgaaaatattcgacgcggtgagtaacccgacggataccagtttcaggcttaccgcctcgcccgctaaggctttgttaagcaactcaggtttactaaaaagtgccgcagttaatacttctttggctttgttttcagcgccgacgtgacgcagaagcggatctttttcatgatagggggaaagcacgccatgacgtatcccgcaaaaaagcgttttatctttaccgtcctcatgcacactcaccgtggacatccacaaattattggcgtgatgaatattcttggtatcccaactgcatacgccctttccctcataagcactgggaaagatatcttttgcgccgattttcatctctgctgcagggagctgcgtgttggtatagtgatgcccgttatgcgtgagtgtattttttatggtttgccagggctggttattaagctgcttgacctgagcatctctaaacgctactgccgcaaagcgatgagcttcttttgcaggtaagccatcctgctgctgagtgcgtgctgcaataagttcgataagatttttcttcaatgcttttgccgcggcttcttcttgttttgttgctggccggtccgctttaactttggctaactccatttggtttgccattgacgttagaaccgggtcttgtttacccagaacggttgccgcgacggtaagaagatcgcgctgtaagttatagaggttatgcagcgagtggttagacgccttctgatgctgtagataattcccccatgtcgcgccgggttctcgcaggacaataatttccgggcgagcgtcgggcgctttagccggcgctttgccctggcctgagagaatctgcattccgttgtataaggttttttgtaggcttttaaaagcctcctgggtttttagtgaagctgagtgatagaagctctgtatttgcatagcgtttttaatattcctgaataggggagtgggaacattcaacagggttaacaaccctttaaaaggatgtgacttttatgcaccaggaactttaaaaaaatgtcctttttaatgaggaaacgcttctgatcaggcggggaggcatcctgacgtccatacgtagtggcgatcatgggggagatcggtacatcaaatgttcataaaatctacaaacttcacaatttatggcacaacttttattgaaaacccaccttcttgactcagatcaaattcaccgatttactcctgcgtaaagtaacggcgttacatcaaatgttatacaggtgtgtgtatgccagcaaagccccggacaagtaagaccgtgacgaagaatattcgtttttcctattccatgcttgaacagatagaattcgcgttgaaatctgaaaagacgcggaatttttcagcatgggtaaaagaggcctgtcgggaaaagttatgtaacacgggacataagctgtagttatcgtcttatgtaagagggggcggccattttgaaaagaacaacgtgcttatatacctcctgggtttttgccgcttttgtctctctgctgatatttgcctggagtgtcataaactatcctctctatgaatccataataattattgtcttttatatctggctaattctggtaccgctttatcttattgtgtatgagtggctaatagattgtcattaaatttatggctgcgtacttgaaaagtgatatttcatatctgtacggtaagtcattgtcgtaataatattattggtcaggcgacgggcgagcgtctgcgcattttgcatcgttttatcttcaaaattttgcagtaagcgttgcgcttctttcggatgcgacgcatataatctcagatagctctgctccatcttatactgctgcttagctgtttgctgttcaaatgttttccaggcgtgttgcacatctggcgcaaacgcattgtagtcctgcataaccagcgtttgcagcgtgcggaatgtccagtaggtagagtcgttgctcgcccgatcggttcctttatcatctccgggttgataatgacgcatcccctgataataggggagatagacgctaagagatggcattccataggcgatgtattctacgttgccgatagcctgcggtaatttcggtctgacctgtaaaatatgtgactcctgggtacgaaaaacggatataggtcgccatggttcttgtggattatgactggcataagggtcgtgcgacgttccctgatagtgattgcgtagcgcgttttttactgccgccacgctgatcttcgttattggcgttaaaaaaacaggaaatgtttccccttcgctaacgaccgtatccagatgcggattaaactggtgttgtagcgtccagacgcgcggataattataggtggtatcgtttttgttatcctgcgaataggcttgatgaaagtcgaattcgccgcgggccggatcatataatccctgctttttcgcaaagcttactaacgttggtgacgccatataattcgcgttatcattcggatcgtaatggcgtaaacgtccctgattggcggaaacgaaatagctatctgccggaagtcgtactgccagccattgatgaccgcttcccgtctccagataccatatctctttgctatcaataaacgcgacgccgaaaccttcgcccgcgcctttttgttcaataatatctcccagtaatttggcgccctgacgcgccgattgcgccactggcaggatcacggactcaatggcgtcttccgtgattcccgtttttgtcacgtaaggatcggcagccagcgccgctctgccgttataaatggtttccgttgcgctcattccgacgcccgccgaattgaaaccggcttcacccatggcgttatcgttagtatcaaagtcatgaatcgccgtatagcgcatcgctgtctccggaagcggccagctaaaattgttccgatgtgctttatactcgccttgttgatgaaacgcgatgggatgaataaccttatgcttggcgttatttgccgagccatcttcgttgcgcgcgataatgaaggagccgtcagccgaagcctgattgcctaccaaaagggtagtacaggcgatgactttacccatacccagcagcgtaacggcgaatgcaagatactttttcataaaggttcccactgaataacgcattatgggatgaattgaccctggattggaaaccgagaaagtgatcgagccagcaatattctttgccggcatcctttattttctctttattgaggttgtattgataaccacagccctgtggcagggaaggggaacagaacctgtcctgaccttagctatcaccactatcaggcagacgaaccgaaaagatattatgttcatcggcatagcggtaagatgccgagccaccgtgtaatagagcaatcgcgttaactaacgataaccccaggccgaaaccggcagtgtggcgggcattatctcctcgccaaaaacgccggaaaagcttatccgcatcggcggggtggctgcctggattagcgacccgaatttctgcaacgttatcatcataagcgctttcaatacgtatcacggcgttttcatcagaataacggatggcattcgtcagcaggtttgagagcactctttgtaataatatttcgtcagcccataccgttccctgacattgatttataaaacagatgcgcttctcctcggcaagggggctaagataatccagcatattttcgaccagcgcattgagcgaaacaggctgtttttttaccgctatattctggtgctccgcgcgtgccagaaagagaatattttctgtcagtcgcgacagtccctccagctcttcaatattatcgacaagggcttgttgatactcttcggcgctgcgttcctgactcagcatcacctgattcttccccagtaaaatattaaccggcgtgcgcagctcatgcgccagatcgtcggcaaattggttcaggcgttcaaaatcgtcggaaagcttctggcgcatggtatttagcgcttgtccaagcggcctgagctcaacgggtaacgcctgttccgccaacggctggcgaagtgtgccgctatctgtcgccgcggtgagtcggctgagcgacgtaatggcccgcagcccgtttctgatgactaatggactgagcgccgaacagacgaggatcgcgataaggctcatcagcaaactgttgcggcgatattgcgccagcatttgccgcctttccgtcgccagcctggcaatagtaagggtcagcgggtcatcgccgcttctggcgcttacgcgtaccgcggtcagttccgtgccttgtaccgcctggcgaaataaggtttcgcgggtgatgtttttagtcagcggaatctcgttaaagcgttggtcggggatgccgctatgattaatcgcaacattgtggcctgttgctgaatggatcaataagatgtcctgcttcgtatccaccatccgattgaaatagagcggcagattttccggcctggcgccatccagtaacagttgctgcatttgcgccgcccgatttattagcgtcatatcatcccgatacgttaattctttgctcagcgcgttatagagcgtccagctaatgccggtacaggcgaggataaggatggcgataaaagaaattgtcaggcgcagcgtcattgataacttaaccattctgcgacgtttccgcctgtaatcgataacccatcccccggacggtcataatgagcttcttttcaaatggatcgtctactttggcgcgcagccgacgaatcgcgacatcaacggtgttggtttcactatcaaagttaattccccaaacttcgctggcgatcgcggttcggggcacgatttctcctgcccgggacgccagtaaccagaggagcaggaattctttgcgggtcagggaaatcggtttgccatttcgtgacactgattgctttgtggcatccatgtccagaccattgatcgtcagtcgagtaaaggcagggacatgctgtctgagttgagctctcacccgggccagcagttcggcgaaggaaaaaggcttaacaaggtaatcattagcgcccgcctcaagacctttgacgcgatcctcaaccgagtcgcgcgccgtcaggcaaataacaggggactgatgcgcagtgcgtaacgcgcgtaaaacctgccatccatcaagccccggcagcataatatcaagaataatcaatgaataatgttcctgaagggccaggtgtaatccgtctcgtccatcacaggcataatcaaccacatagcctgcttccgtgagtccctgacgtacccactcaatggttttctggttatcttcaatcaataaaatcttcatcaacgcagtatgccataggcttgttagcgaatccgtaaatctccaacaagatgacataattgtcatgtccgtgtaaggttaatcctggacgcgccagatatattttcctgcatcaataccgtaaaggagtgaagcatgaaacgatatatactggctaccgtgatagcatctcttgttgcagccccggcaatggcgctggccgctggcaacaatattctcagcgtacatattctcgatcagcaaacaggtaaaccggcgcccggcgtggaggtggtactggagcagaaaaaggataacggatggacgcaattaaacaccgggcataccgaccaggatggacgtattaaagcactgtggcccgaaaaagctgccgcgccgggggattatcgcgttatttttaaaaccggccagtattttgaaagtaaaaaactggatacgtttttcccggagattcccgtcgagtttcatatcagcaaaacgaatgaacactatcatgtgccgctgttattaagtcagtatggttattcaacctatcgcgggagctaatttagagcctatcccattagggttattttacttgccattttggtcctgggcagtgctcgccaaaacgcgttagcgttttgaacgccgcttgcggcggcccgaagggcgagcgtagcgagtcaaacctcacgtactacgtgtacgctccggtttttgcgcgctgtccgtgtccaaactggctgcgccaataacgcctggtgggataggctcttagattgtattaatcgccgcgatttatggcgagcaaacatcgcggcgggaataaaaatcttcagcgtatcgactcttctcccacaagcggtggttatcccgcttgtgggcatgagtgacggttaaacaggcgcttccatctcaagtctgaccggatgaaaacggcgtttgaaataaatcaggccatgcccatcctggctaagaataatatttttgatcgccaccagatacaccagatgcgtgccaatggtttgtacctcgctgatctcgccttcaagaccggccagcgcgccgttaagtaccggctggcccagcggcccgttttgccaacatggctggtgaaaacgctcttccatcgccatccccgtcataccggcaaagtggcgcgccatcagctcctgctcatggttaagtacattaatgcacagcctgccgttaccctgaaaaacggggttcatggcgctattggcattaatacataccattacggagggcggcgtatcggtgacggaacagaccgctgttgcggtgataccgcagcgtccggcgtgacccgccgtggttacgatgttgaccgctgccgccagacttgccatcgcatcgcgaaaacgcagacgttgttcatctacttgcatgagaacctcctgccgcgttatttcagcagcttatccagttgattgatgtcgtcgttattgtgcaaatgcgaaaccgtccagccattctgatcgtattcggagaggcagcgatcaaccattgccatcatcttatccatattgccggagctctgggcctgacgcaggcactgcagacgaatttcatcctggctgcccgagtagttaatctcgtacagctcatggcgaccgccaaactcgctgccgatggcatcccacatcaatttaagaattttgatacgttcaacatggtccattccgttagagccgcgtacgtatttcgccaggtactggtcgatttgcggattattcagatcgcgggcgctggaaggcaggtaaatcaggccgctggtaacgttacgttcaataatatttttaattttcgcgtaggccattggggccatcacacgataggtttgcagcgcggcgtggtccggtagccaggcgccgtttacccacggggttgcttcggaacacatagaatcgctcaatgcccagaacatattgcgccaggccacgacttcgccgagatcggcctgcacgccccggaactctacggtacccgtacattcgagcgattttttcagcagcgcggtaatgaaatcaagtttaaccgccagacgaacacaggcttgcagtggatacatacgggcaaagccgccttccatcgtccagcgacggcaacgatcgaaatcacggtaaattaatacgttttcccacgggatcagcaccttgtccatcaccagaatggcatcgttttcatcaaagcggctggagagtggataatcaaacggcgagcccgtcgcgcccgcgaccatttcatacgaggcgcgcgaaataagttttacgccttcggcatccattggcgcgacaaacatcagagcaaaatccgggttttcgcccatcacctgggctgagccgaaaccaatcatgttgtagtgagtcagggcggagttagtggcgacgactttcgccccgctgacaataatcccggcgtccgtctctttctccagcttgatatagacgtctttcacttcgtcggcaggtttgtggcgatcaatgggcgggttgacgatagcatggttaaagtacaggccggtctcctgaatacgggtgtaccagttacgggcgttctgctcaaactggccgtagaaggctgggttagcgcccagagcgcagccaaaggcggctttgtaatccggtgtgcgtcccatccagccgtaactcaggcgtgaccactcggcgatagcatcacgctgttggcgcagatcgtctgcgcttttcgccacgcggaaaaatttatgcgtataaccgccgctgccggtatcggtattccagcatagggtatcttgcatcgacggtttatgtaatgcgtcatacagttgtgcgacagaggctgcggcattgcggaatgccggatgtgtcgtaacatctttaacgcgttcgccgtaaatataaatttcccgcccgtcctgcaggctttttaaatactcttcgcccgttaacggacgcttgttatcagtacgaaaatcttcaggtttcattgcggcctcttcctcgttaatcggaatgttttgttaataatatgtttcttatttgttgttcaattgaataggcagaagcgtaaactgtgaagagactttcaggacaacggcgggtacttttcagatgaacgtcgaagaagaagagtaaaatgcgatcgccgtcaacgttgtaagcgggaggggattcccgtgtcggcggcgtgggaaggtaagaatactatgcttccgcttcgctatcaggatgctggcgtcccagagcaataagatcgtccagcagcagcatcaattgctgtgttttttcgggcgtgaaatcggcctcaatttttcgataagcctcttctacctggcttcgggcacgggcgtacaacgtttgtccctgctccgtcaacatgacatataacttacgctgatcgttaaccggcttgagtcgcaacaccagtccgtctcgctccatgcgcgtcaatattccggtcagacttggacgcaaaatgcaggtacgaaaggccagctcgtgaaaatccatagaggggctatcggccaggattcgcacaatgcgccattgctggtcggtcagattgtggcttttaacgatggggcggaaataggtcattgccgcttcgcgcgcctgaagcaatgcgatggttaatgaatcatgcataagcgtttctcttttgcagaattattaatacctgaataatcgtgtttaccgatgtgagctatgacatctgttttatgtccaaagtttaacagaaacaaggggctttatttaactatttgatatgtatgtgtttaataataaatttgtgaaaatattgttaatcacatcacaaatactttacttcagcttgctaaatgtacagcgaaagcataaatctaatcattaatatattaatgaaatcacagcccgttaaatcggcctgaggagtttatgtatgaagggtactgttttcgccgttgcgttaaaccatcgcagccagcttgatgcctggcgagaggctttctctcagcctccctataatgcgccgcctaaaaccgcagtgtggttcatcaagccgcgtaatacggtgattcgtcacggcgaacccattccttatccgcagggagaaaaggtactgagcggcgcgacagtggcgctcattgtggggaaaaccgccagccggatacgccctgaagcggcggcggactatatcgccgggtatgcgctggctaacgaggtcagcctgccggaagagagcttttatcgcccggcgattaaagcgaaatgtcgcgatggcttttgcccgctgggtgaaatggcgccgctgagtgatgtggataacctcaccattatcacggaaatcaacggacgagaagcggaccactggaatactgccgatttacagcgtagcgccgcacaactgcttagcgcgttaagtgagttcgctacgcttaaccctggcgatgcgatcttactcggtacgccgcagaatcgcgttgcgctgcgtcccggcgatcgggtgcgtattctggcgaaaggtttacccgctctggaaaatccggttgtcgcagaagatgaattcgcccgccaccagacttttacgtggccgctgtcagcgacgggtacgttatttgcgttggggttgaactacgccgatcacgccagcgagctggcatttacgccgccgaaagagccgctggtatttatcaaagcgccaaacacctttaccgaacatcaccaaacgtcggtgcgcccgaacaacgtcgaatatatgcactacgaagccgagctggtcgtggtgattggcaaaacggcgcgtaaggtgagcgaagccgaagccatggagtatgtggccggttacaccgtctgtaacgactacgcgatccgcgactatctggaaaactactaccgtccgaatctgcgggtaaaaagccgcgacggcctgacgccgataggcccgtggattgtggataaagaggcggtttctgatccgcacaacctgacgttacgcacctttgtcaacggtgagctgcggcaggaagggacgaccgccgatctgatcttcagcatcccgttcctgatttcttatctgagcgaatttatgacgttgcaaccgggcgacatgattgccaccggtacgccgaaagggctgtccgatgtggtgccgggggatgaagttgtcgtggaagtagaaggcgtgggccgcctggttaaccgaatcgtcagtgaggagagcgcaaaatgaagaaaataaatcattggattaacggcaaaaatgttgcaggtaacgactacttccagaccactaacccggcgaccggtgacgtgctggcggaagtggcctccggcggtgaagcagaggtgaaccaagctgtcgcggcggcaaaagaggcgttcccgaaatgggccaacctgccgatgaaagagcgcgcgcgcctgatgcgccgccttggcgacctgattgaccagcatgtgccggaaatcgcggcgatggaaaccgccgacaccggcctgcctattcaccagactaaaaacgtgctgatcccgcgcgcctcgcataacttcgaattcttcgccgaagtgtgccagcagatgaacggcaagacctatcctgttgacgataaaatgctcaattatacgctggtgcagcccgtcggcgtctgcgcgctggtgtcgccgtggaacgtgccgtttatgaccgcgacctggaaagtcgcgccgtgcctggcgctgggcaacaccgcggtgctcaaaatgtccgagctgtcgccgctgactgccgacaggctgggcgagctggcgctggaggcaggaattccggcaggcgtgctgaacgtggtgcagggctatggcgcgacggcgggcgatgcgctggtacgccaccatgacgtgcgtgcggtgtcgtttaccggcggtaccgccaccggtcgcaatatcatgaaaaatgccgggctgaaaaaatactcgatggagctgggcggcaaatcgccggtgctgatttttgaagatgccgacattgagcgcgcgctggacgccgcgctgttcaccatcttctcgatcaacggcgaacgctgcaccgccgggtcgcgcatctttatccagcagagcatttaccctgagttcgtgaagcgctttgccgaacgcgcgaatcgcctgcgtgtcggcgatccgaccgacccgaacacccaggtcggcgcgctgattagccaacagcactgggaaaaagtctccggttatattcgcctcggcattgaagagggcgcaacgctgctggcgggcggtgcggaaaaacccactgacctgcctgcgcatctgaaaggcggtaacttcctgcgcccaaccgtgctggccgatgtcgacaaccgtatgcgcgtcgcgcaggaagagatctttgggccagtcgcctgtctgctgccattcaaagacgaagcggaagggttacgtttggcgaacgacgtggaatacggtctggcctcttatatctggacccaggacgtgagcaaagtgttgcgcctggcgcgtgggattgaagccggcatggtcttcgtcaacacccagaacgtccgcgacctgcgccagccgttcggcggcgtgaaagcctccggtaccgggcgcgaaggcggcgaatatagcttcgaagtgtttgcggaaatgaaaaacgtctgcatctcaatgggcgaccatcctatcccaaaatggggagtttgatatgggcaagttagcgttagcagcaaaaattacccacgtgccgtcgatgtatctttctgaactgccgggaaaaaatcacggttgtcgtcaggcagccattgatgggcatattgaaattggcaagcgttgccgcgaaatgggcgttgacaccattatcgtattcgacacccactggctggtgaatagcgcttaccacattaattgtgccgaccatttccagggcgtctataccagcaacgaattgccacactttattcgcgacatgacctatgactatgacggcaatccggagctcggccacctgattgccgacgaggcagtcaaactgggcgtgcgcgctaaagcgcataacatcccgagcctgaagctggagtatggcacgctggtaccgatgcgctacatgaacagcgacaagcacttcaaagtggtctccatctcggcgttctgcactgtgcatgattttgccgacagccgcagactgggcgaagccattctcaaggcgattgagaaatatgacggtaccgtagcggtattcgccagtggttctctgtcgcaccgttttattgacgaccaacgggcggaagaagggatgaacagctacacccgcgagttcgatcatcaaatggatgagcgcgtggtcaagctgtggcgcgaaggcaaattcaaggagttttgcaccatgttgccggagtacgccgactactgctacggcgaaggcaacatgcacgacacggtcatgctactgggaatgctggggtgggacaaatacgacggcaaggtggagttcatcaccgacctgttcgccagctccggtaccggccaggtaaacgctgttttcccgctgcctgcgtaaggggtgtttatgccgcactttattgctgaatgtactgaaaatattcgcgagcaggctgatttacccggcctgttcagcaaggtaaacgaggcgctggccgccagcgggattttccccatcggcggtatccgcagtcgcgcccactggctggatacctggcagatggctgacggtaagcatgattacgcgtttgtgcatatgacgctgaaaatcggcgccgggcgcagcctggagagccgtcaggaagttggcgaaatgctgtttgggctgattaaagcccacttcgccgacctgatggagaaccgctatctggcgctgtcgtttgagattgccgagctacatccgacgctcaattacaaacaaaacaacgtacacgcgttatttaaatagcacactctttcgcccggtggcgctgcgcttaccgggcctacaaaaaaacgatgcacgaagcaataccgaaccgtaggccgggtaagacgcacccgcgtcgccacccggcacagcagcaccgaatgacgtaacaggaaacactatgctcgataaacagacccataccctgatcgcccagcgacttaatcaggctgaaaaacagcgcgaacagattcgcgcagtgtcgctggattatcccaacatcactattgaagatgcctatgccgtacagcgtgaatgggtcaatatcaagattgccgaagggcgcacgctcaaaggccacaaaatcggcctgacctcaaaagcgatgcaggccagctcgcaaatcagcgaaccggattacggcgcgctgcttgacgatatgttcttccatgacggcggcgatatccccaccgaccgttttatcgtcccgcgtattgaagtggagctggcgttcgtgctggcgaaaccgctgcgcggccctcactgcacgctgttcgacgtctacaacgccacggattatgtgattccggcgctggaactgattgacgcccgcagccacaacatcgacccggaaacccagcgtccgcgcaaagtgttcgacaccatttccgacaacgccgccaacgccggggtgatcctcggtggtcgtcccatcaaaccagacgagctggatctgcgctggatctccgcgctgctctatcgcaacggcgtgatcgaagaaaccggcgtcgccgcaggcgtgctgaatcatccggccaacggcgtggcgtggctggcgaacaagcttgccccctacgatgtccagcttgaagccgggcagatcatcctcggcggctcgttcacccgcccggtgccggcgcgcaagggcgacaccttccatgtcgattacggcaacatgggcgcgatcagttgccggtttgtgtaaggaaaaaacgatgaaaaatgctttcaaagacgcgttaaaagcggggcgtccgcaaatcggtttgtggctggggcttgccaacagttacagcgctgaactgttagcgggcgccggcttcgactggctactgatcgacggtgaacacgcgccaaacaacgtgcagacggtgttgacccagttgcaggcgattgcgccttatcccagccagccggtggtgcgtccgtcatggaacgatccggtacagattaagcaactgctcgacgtcggcgcgcaaacgctgctgataccgatggtgcagaatgccgatgaagcgcgaaacgccgtggcggctacgcgttatccgcctgccggtattcgcggcgtgggcagcgcgctggcgcgggcatcgcgctggaaccgcattccggagtatctccacctggccaacgacgccatgtgcgtactggtgcagattgaaacgcgtgaggcgatgagcaatctggcgtcaattctcgacgtggatggcattgacggcgtgtttattggtccggcggacctcagcgccgatatgggctttgccggcaatccgcagcacccggaagtgcaggcggcgattgagaacgccatcgtgcagatacgcgcggcggggaaagcgccggggattctgatggccaatgaagcactggcgaaacgttatctggaactgggggcgctatttgtcgccgtcggcgttgacactacgctgctggcgcgcggagcggaggcgctggcggcgcgctttggcgtagaaaaaaaactgtccggtgcgtccggcgtctattaagcctggccccgtaagcgcagcgctaccgggcaaccgtagtaccctacaaaattcccatcagaggaaaaaaaatgagcgacacatcatctgcacttccggaaagccccgagtctgtcagttcgcacaacgcgctcagcacgggtcaacaaaccgtcataaataaactgttccgccgactgatcgtatttttattcgtgttgtttatcttctcgtttttagaccgtatcaacatcggttttgccgggttgacgatggggcaggatctggggttaagcgccaccatgtttggtcttgccacgacgctgttttacgctacctacgtcattttcggcattcccagcaacgtgatgttgagcatcgtcggcgcccgccactggattgcgaccattatggtgctatggggcattgcatctaccgccacgatgttcgcggtgggaccgaaaagcctgtatgtgctgcgaatgctggtgggcattaccgaagcgggctttttgccaggaatattgctctatttaacctactggttcccggcatttttccgcgcccgcgccaacgcattatttatgattgccatgccggccactaccgcgttggggtcgattgtctccggctatattttatcgctggacggcatattcaatctgcatggatggcagtggttattcctgttggaaggatttccgtcagttttgttaggcattatggtctggttttacctggatgataccccggcaaaagccaaatggctgacggcagaggataaaaaatgtttgcaggagatgatggatagtgaccgcctgacgctggttcagccggagggggccatcagccataacgccatgcagcagcgtagtctgtggcgcgaagtattcacgccaattgtactgatgtatacgctggcctatttttgccttaccaatacgcttagcgccattagtatctggacgccgcaaatcctgaaaagttttaatgaaggcagcagcaatatcaccatcggcctgctggcggcgatcccgcagatttgtactattctgggcatgatttactggagccgccattcggacaaacatcaggagcgtaaacatcacacggcgttgccgttcctgtttgccgccgcgggctggctgctggcgtcggcgaccgaccataacctgatccagctcctggggatcgtgatggcatccacgggttcctttagcgcgatggcgatcttctggaccacgccggatcagtcgatcagtttacgcgccagggcgataggcattgcggtcatcaatgccaccggcaatattggctccgcgctcagcccgtttatgattggctggctaaaagatatcaccggtagcttcaatagcggactctggtttgtcgcttctctgttagtcgtcggcgccgccattatctggcttattcccatgaaagcatcgcgtccgcgcgccaccccttgaggagaaactatgtgccaacgtgcgatcgccaatattgatatcagcaaagagtatgacgaaagcatgggcagtaacgatgtgcattatcagtcgtttgctcgtatggcggatttctttggtcgtgatatgcaggcgcatcgccacgaccagttttttcaaatgcactttcttgataccgggcagattgagctacagctcgacgatcatcgctattcggtgcaggcgccgctatttgtgcttacgccgccctcggtgccgcatgcttttattaccgaatcggatagcgatggccatgttctgacggtacgcgaagagctggtttggccgctgctggaagtgctttatcccggcaccagagaggcctttggcctgccgggaatctgcctgtcgctggcggataaacccaacgagctggcggcgctcaaacattactggcagctaattgagcgggagtccacggaacaactggctggctgcgaacataccctggtgctactggcgcaggcggtatttaccttgctgttgcgtaatgcgaagctggacgatcacgccgcaaccgggatgcgcggtgaactgaaactttttcagcgctttaccctgttaattgacaaccacttccatcagcactggacggtgcccgattatgcctgcgagctgcatattaccgaatctcgtttgaccgatatttgccgacgttttgctaatcgcccgcctaaacgcctgatttttgatcggcaattacgcgaggcgaaacgactgctgcttttttccgacaatgctgtcaacgagatcgcctggcaattaggttttaaagatccggcttattttgcccgtttctttaatcgccttgctggctgttctccttcgcagtttcgccaacgtgaagttccctcttttctcaactaagaagagtaaaaacatgatgaaaaaaagcgtcgctatgctggcggtgtgtatgctggcgcaaagccaccttgccattgctgccggtactcctgcgcctcaagagatcaacattgttttactgggcaccaaaggcgggccttctttgctcaatacagccagactaccgcaagcgacggcgcttactatcggcgataaaatatggctgatagatgccggctacggcgccagtctgcaactggtgaaaaatggcattccactgcgcaacatcaatactattttgctcacccatctgcacagcgaccacatactggattatccttccttgctgatgaatgcctgggcgagtggtctgaaagaccataccatacaggtttatggcccgccgggaacccaggcgatgacgaaggctagctggaaggtctttgacagggatatcacgctacgcatggaagaagaggggaaacccgatccgcgcaacctggttaaggcgaccgatattggccagggcgtcatctataaagatgaactggtcacaataagcgcgctgaaagtgcctcattcccctttcccggacggtgaagcgtttgcttaccgttttgatacccagggtaagcgaatcgtcttctctggcgatacgtcctggtttccgccgcttgcaacgtttgcccagggggcggatatcctggtacatgaggcggtacatgtcccctcggtagcaaaactggctaatagtattggcaacggaaaaacgctggctgaagcgattgcgtcgcatcacaccacgattgaagatgtcggtaagattgctcgcgagtcccacgtgaaaaaactggtgttaagtcatctggtgcctgcgacggttgcggatgacgtctggcaacaggaagccatgaaaaattacccgggccctgtcattgtcggtcatgacaatatgacgataagcgtaccgtaggtatcagagcagggataaacccacgggctgacatgatgtcagcccgttatgcttttggcgatcagcatgacgcgcagagcttttgtctaaaacattattttttctaaacactacttgctgatttttatgcacaataaaggtaagatgattgctctggtgaaatatcactaaataagaatgtcacggatggaatttatacagtgttaaaagcaatgcgtttctttgtctgccggccatcagtaatatcctctgtaccggctcctcgttgccaaagtgaaggttagattaaacgaatcaaaaaatatccgaactgtacaatttttatatcaaacatatttaactgcaaaatactgcaaacgtgcgcgaatacacttaatcagtagtatggctaatgcatactttatttcctaaactttcttattatctatttgaatatttctggttaaaccaaatggacaaacggataccagacactcgaaaggataactgcaggcttctgatttaggattgcagttaccaggacaatggctattttctttaagcgatttccatagaacaggattaaacctggtaacgttgtaaacagtaacgggataaagtttatcgtttattaagacccccttattaaaggggatgataatgctacctggaggcatgtaaacatctgcctgataccataaggtcaatctaagattttttaggctatgtatgcatgagaacgacactccggtagagggacttataactgtatcaacgaccttccattccattacagaaaccttttaagtgaaatagtcaatggtgtaaattacattttccgcaagcctattcaggatagatgaaaatctgagaaacataactcgttgaaaacgatcgttttttattgaccactctatttatattgattttttaataagttatttattttatgctcttattttgtttacattctattacatttttgtattttaggcgtggtgtaaatattgggcggtagtggatgttataacgctcaattattaaactgtaagtgactgttgtatttcttatttataaataccgcaacctgtaagcgcagcggtacattttacccggcattgacagggagaaggtacgtatcaaccagagagtacaaaacagtgaaagaatatattcttcaggcaataaatgatcgctaacgtgtaaaaataaccgacgtatctaaaaaatgtgaacgtgtggctggtctttatttaaacgatgatcttcgcaatggcgcattaatggctgacattggcggttcgttgatcgggttgtgcgcggtgaaaggctatatttcttccgttgagggaagtatgtcagaggcattctggtattataccgggtgcatgtaaatccggggtgggcagaaagcccaccctcggtttattgcctttatcgtggattagggatgcgagataaagcgagaaaggcgttgcagcagtaaccggttttcttcgcgcagccgtgaattctcttccagcagcgttaacgcgaccgcgatcccaggccagtcgagcgccagctcctcgcgtaagcgtagcgcgcgttgtaccacgctcgctgcgcgatcgtcgaattgccagtcggcgttatcgtcttcgtaaggctcaattacgccaagtccgacgatttcgtttagctcctcttccgtcacgccggtgtgcaaacaaaattcggtgatggtaaaggtgacagtgatgttagccattatgctttcccccattgctggcgtgggtcaaaggacgactgcgcgtccgccagttgttgccacagggcagctgttttctcgtcaggtttcggcggcataacgattttgatgatggcatagagatcgccagtgtgctttttactggctaatccttttcctttgatacgcagccgctgacctgcctggctgccggggggaatggtcagcaaaatacgctctttaagcgttggcacagacaccttagcgccgagcgccgcctcccatggggcaagcggaaggacgacttccagatcctgattgacgatatcaaagagcggatgcggggcaatatggataacgagccataaatcgccattaggtccgccgttttcccccggcgtgccctggcctttcagtctgattcgttgcccgttgctgacgccagccgggattttcacattcaatgtcttgggaatttcccgctccaccaggccgaacgcgttataaacggggacggaatagctaatcgtacgctggtgctcttccagcgtttcttccaggaataccgccacttcaatttcgatatcatgaccgcgtgcggcgtggcggtgatgcgaatggcgaccgtgctgaccaaaaatagacgagaaaatatcatcaaaatcttcagcgttatacggctggccttcgtgttgctggaactggcgattaaattgtggatcgttacggtgttgccataactggtcatactcggcgcgccgttgctcatcactcagcacttcccatgcttcagcaacctctttgaaacgggcttcggcatcgggttctttgctgacatctggatggtacttgcgggccagtcggcgataggcggtcttaatcgtcttgagatcgtccgtcggtttcacgcccataatggcgtaataatccttaagttccatagcatcatctcgctaaatcaatacatacagaagggaccccaaaaggtttctccactaagtgtagggtaaacctgaaaagtgcgtatgaaaacaccagttatatcattagtaagaataaattacgttgttcgactatcagaaggttgcgcagcgcgccgacataactttacaggggaaaggttgccaaaaccgcgccagtggctaagataactcgcgttaaacagtgagggcgcaatggcgaaacaacaacggatgggctggtggtttctttgccttgcatgtgtcgtggtaatggtttgtaccgcgcaacgcatggcgggcctgcacgccttgcagatgcaggcgacggcctctgctgcggtggtcagcgctccctcctcgacagatgacggctcgccggtcaccccctgcgaattaagcgccaagtcgctgctggcggcgcctccggtactctttgaaggcgctatccttgcgctttgtctactgctttccttactggcgcctgtccgggtcatgcgcctgccgttttcgcctccacgggctatttcgccgcccacattacgggtacatctacgattttgtgtcttccgtgaatgacagaccggttattgctaacggttaattactcattcacggagaaaaaatatgatgattttgttcaggcggatactgttctgcctgttatggctttggctgcccgtctcctgggcggcggaaagcggctggctgcgttcgcccgataacgaccatgccagcatacggctacgtgccgatacgtccgctaacggtgagacccggctgttgctggatgtcaaactggaaaacggctggaaaacctactggcgcgcgccgggggaagggggcgtggcaccctctatcgcctggaaaggcgacatgcctgaggtaagctggttctggccaaccccctcgcgctttgatgtggcgaatatcaccacccagggatatcacgacgaggtgacctttccgatgatcgtgcgcggtacgctgccggcgaccttgcgcggtgtgttgacgttatcaacctgcagcaatgtttgtctgttgaccgattaccccttttccgtgacgcctactgtgcagaatgccgattttgcccatgactatgcgcgggcgatgggtaaaattccgctccgcagtggactaacggactcgcttgacgtcggctatcgcccgggagaactggtggtcactgctacgcgagcggcgggctggtcatcgcccgggctctatcttgacaccgtagatgacgtcgattttgcgaagcctcgtctgcgcgtagagggcgacaggttacaggcgacggtgccggtgacggacagttggggcgaaaaggcgcccgatttgcgcaacaaatcgctgaccctcgtgttagccgatggcgctatcgcccaggagagcacgcaaaccattggcactgcgccagcgcaaacgccggacaatgcggcgctacctttctggcaagttgtaatgatggcgctgatcggcggactgattcttaatttaatgccctgcgtactgccggttctgggcatgaagcttggctctattttattggtagaggaaaaaagccgctctcacatcaggcgacaatttttggcttcggtcgccggtatcattgcgtcatttatggcgctggcggcgtttatgaccctccttcgcctgtcaaaccatgcgctggcctggggagtccagttccagaatgtatggtttattggttttatggcgctggtgatgttgttgtttagcgccagcctgttcgggctttttgagttcaggcttccctcatctatgaccacgaaactggccacttacggcggtaacggtatgtcgggacatttctggcagggggcattcgccacgctgctggcgacgccttgtagcgcgccgtttctgggcacggcggtcgccgtggcgctcacggcgtcgctgccgacgctgtgggggctgttccttgcgcttggcctggggatgagcgcgccgtggctactggtcgcgatacgaccagggcttgcgctacgtttaccgcgccccgggcgttggatgaatgtcctgcgcaggatcctcggtctgatgatgctggggtcggctatctggctggcgacgttactcctgccgcatttcggcttcactgcgtcaaagagcgcgcaagacacggttcagtggcaaccgttgagtgaacaggcaatccagtcggcgctggcgcagcataagcgggtatttgtcgatgtcactgcggactggtgtattacctgtaaagtgaataaatacaacgtcctgcaaaaagaggatgtgcaggccgccttgcaacagccggatgttgtggcgctgcggggagactggacgctgccgtccgatgccattacagattttctgaaaacgcgcggccaggtcgccgtgccgtttaatcaggtatatggccccggcttgccggaaggggaggcactgcccactttgctgacccgcgatgcggtattacaaacgttgaaaaaagcgaaaggaataacccaatgaaatacatgattgttttactgctggcgctgttttcgacgctgagcatcgcgcaagaaaccgctccttttacgccggatcaggaaaagcagattgaaaatctgatccatgcggcgttgtttaacgatcctgccagcccgcggataggcgctaaacaccctaagctgacgctggtgaactttacggattacaactgcccgtactgcaaacagctcgatccgatgctggaaaagattgtgcagaaatatcctgacgttgcggtcattattaaaccgctgccatttaaaggagagagttccgttctggcggcgcgtattgcgctgaccacctggcgcgagcatccgcaacagttcctcgcgctacatgaaaaactcatgcaaaagcgcgtttaccatacggatgacagtattaaacaggcccagcagaaagcaggggctacgccagtgacgctggatgaaaaaagcatggaaacgatacgcactaatttgcagttggcaaggctggtcggcgtgcaaggaacgccagcgacgatcattggcgacgagctgattccgggcgcagtgccctgggatacgctggaagcggtggtgaaagaaaaactggcgtctgccaatggcgggtaaactgcggcgttggctgcgtgaagccgcggtttttctggcgctcctcatcgcgataatggtggtcatggacgtctggcgcgcgccgcaggcgcctccggcgtttgccacgacaccattacgtacgctgacgggagagtcgacaactctggcgacattgagcgaagaacgccccgtactgctctatttttgggccagctggtgcggggtatgccgctttactacgcctgcggtcgctcgcctggcggcggaaggggaaaacgtcatgaccgttgcgctccgctccggcgatgacgctgaggttgcccgctggctggcgcgcaagggcgttgacttcccggtcgtcaatgatgctaacggcgccttatccgctggctgggaaatcagcgtgacgccaacgctggtggtggtttcacaaggtcgggttgtgttcaccaccagcggctggaccagctactggggcatgaagcttcggctatggtgggcaaaaacgttctgaatatgcgccggggtttcccggcgctaacgcgtttactgtaagaaaaacccccgttttgcgaaatcgttcccggaaaaatgatccatttctgtcacactcagaacgatttgataacaacaagaggtcatagggatgaaaaaatcattactcgctgttgctgtggcaggggctgttttgttgtcatccgccgtacaggcgcagacaacgccggagggttatcaattacaacaggtgctgatgatgagccgccataatctgcgggcgccgctggcgaataatggcagcgtactggcgcagtcgacgccgaacgcctggccggcgtgggacgttcccggcgggcaactgacgacgaaaggcggcgtgctggaagtctatatgggacactacacacgtgaatggctggtcgcgcaggggctgataccgtcgggagaatgtccggcgcccgacacggtatatgcctatgcgaatagtttgcagcgcaccgtcgccaccgcgcaatttttcattaccggcgctttccccggctgtgatattcctgttcatcatcaggaaaaaatgggcactatggaccctaccttcaatccggtaattaccgatgattctgccgcgttccggcaacaagccgtacaggcgatggaaaaggcgcgtagtcagctacatcttgatgagagttataaactgcttgagcagataacgcattatcaggactcgccgtcctgcaaagagaagcatcagtgttcgctaatcgacgcgaaagataccttcagcgcgaactatcagcaagagcctggcgtgcaggggccgcttaaagtagggaactcgctggtggatgcgtttaccctgcaatattacgaagggtttccgatggatcaggtcgcctggggcgggatccacaccgatcggcagtggaaggtgctgtcaaaactgaaaaacggctatcaggacagcctgtttacctcacccacggtggcgcgcaatgtcgctgcgccgctggtgaaatatatcgataaggtgctggttgccgatcgcgttagcgcgccgaaggttaccgtgctggtggggcatgattccaatatcgcgtcgctgctgacggcgctggattttaaaccctatcagctccatgaccagtatgagagaacgccgattggcggtcagcttgtcttccaacgctggcatgacggcaacgctaaccgggatttgatgaaaatcgagtatgtctaccagagcgcccggcagttacgcaatgcggaagcgttaacgctcaaatcgcccgcgcaaagggtaaccctggaactgaaaggatgtccggtggatgcgaacggcttctgtccgctggataagttcgataacgtcatgaacactgctgcaaaatagccatatgcccccgcgcaggcgggggcgtttgtgttatacgtttttacgttcgatgatttgttcgccccagaagagcgagtctttgtccgttttctcaaaggctttgatcagcacctcatcgctaccttcttcccatattttttctgccagtttctcgtcatagtgagcgacttcaaaaatggcttcggcaatttccggcgacgtattacgcaggcttgcccattcgccgacgcggtgcgcttttgcttcttgagttggcattcgaatcctcctgttgaagattagccgttgagtttgactgccagaccggcgacgtattccccctgatagcgagcgatagagagttcctcctggcttggttgacgtgaaccgtcgcctccagcgatagtcgttgcgccgtaaggcgtgccgccgcgaacctgggagacgtcaaagagttcctgtgcggcatagcctatcgggacgatcaccatcccatgatgggcaagcgtagtccaggtcgaggtgatggtctgctcctggccgccgcccgttccggtagaactgaacacgctgccgagcttgccgtatagcgagccggatgcccacagtccaccggtttgatccaggaaggtacgcatctggcctgacatattgccaaaccgggttggcgtaccaaaaataatggcatcgtaatccgccagctcctgtggggtggcaaccggtgcgttttgcgttttaccgccagcttttgcgaagatttcaggcggcattgtttctggcacacgctttataatgacctctgcgccgtcgactttctttgccccttccgccaccgcgtgcgccatggtttcaatgtgtccgtacatggaataatagagcaccagaatctttgccatttgtactactcctcagattaatcaggtgtgtagcgattcgctacgtctatttaaagatatgctctcctgtgaagagtgcaaatttcagcgccatttctttgatttataacaataattaatttggcgacctttgttgcaaaatgatacatttttaagcgctttgattttcccaaatataagaataacttatttatttcttatggttattattctgcgtattcggcttccaatgttgcagaatatttcggtaagcggcctactacgacgtttttcactatgcttaatgttacgcggcgttactgatgatatcgttcatacgctgcgcgaggagatactcctcattacctatgcaatatgatgtctaatctatgacggaggtcagtaatggcaaaccatcgtggcggttccggtaattttgcggaagaccgcgaaagagcatcagaagcaggtcgtaaaggtggtcagcacagcgggggcaattttaagaatgacccgcagcgtgcatccgaagcaggcaaaaaagggggcaaaagcagtaaccgtaatagctagcctgcgtcacaacagcaagacgctgagcgtttcgcgctaaaaagtgtcatgcgccaccgccgccggatttccggcggtttttttgtttataagccggatttggtatgcttgcgtcctgacaaaaaggagagggcgcatgtcgcaacgcacagagaaaaaaatcgggaaacgctcgcaggccaccggtgcaaaacggcagcttatcttaaccgccgcgcttgctgttttttcccagtatggcattcatggcgcgcgtcttgagcaggtcgccgagcgggcaggcgtctccaaaaccaatctgctttattattatccctcgaaagaggcgctgtatgtcgcggtaatgcgacagattctggatgtctggctggcgccgctcaaggcgtttcgcgcagaattttcccctctggaggccatcaaagagtatatccgtctcaagctggaagtttcgcgtgattatccgcaggcgtcgcggctcttctgcatggagatgctggcgggcgcgccgctcttaatggaggaactgaccggcgatctaaaagcgttgatagatgaaaaatccgcgctgattgccggatgggtgcacagcgggaaactggcgcccatttctccgcaccatttgatcttcatgatttgggccgccacgcaacattacgccgattttgcccctcaggttgaggcggtaaccggcgcgacgcttcgcgatgaagccttttttaaccaaacggtcgaaagcgttcagcgcattattattgaagggattcgcgtgcgttaaccggctggcggcagtgggcagctcaaatccccctcttcacattgcagcagcgaggctaaaaacgcttcgcgttcgttcgttttatcggtcaggcactggctggcgatcatgggttgcacgctgccgccctccgtacctgagcgaatcagcgcgcaatcggcgtcgcgcagggcaatccatgccacctgtgctttttgtaacagctcgcgctgcggcggttgcgcacgcttaagcgcgctttgataggtttcgttcagctttttatctgccgcctggtattgcgcggcggcgcagcgattcatttccagctgcgtactggcgctggcacactcatcggccaacgcctgactgctgatcaacaacgccgcgcaggtaaggaaaattcgtttcatacggtcctctgacgcgagtaaaaaggctccattgacggagccttaattaaccacagtattagccaattgtcatcaggctggcattaccgccagcggcggcagtgtttacgctcagcgaacgttcaatatagagccgttccagcagtatattgctttcgccgcgggcgaacccctgtaccgacactatcgcgccttcgcgggcggcgacggcttcgcacacggttcgcagcttgtcggagtcgccgtggaaaatcaccgcgtcaaacggctgcgccatcagcgtttccgctttcgcaaactggacacgcgccgcgacggcggcggggagacgtttcgccagatcgcggtggaaggcgtcgtctgaccatagcgcctgactgccgacggcgagaacggcggcaagctgcgtcaacgcgtcctgttcatcatcagccaggcataatacccgttcacgcggcaacaacgtccaggtattgcgctcgccggtcggccccggtagcaggcgctgcgtgccggcctgggccagatcggcgaattgtcggcagagcgtctgtagcgccgggcgatccgccgcccattgtgtcagggcggtcaacggcgcgagtagcgtggttttaagctgcgcatccaccgggtaacgcgcatcctgacgagtcagcgtcgtattgagcgcattgggcgggcggtgtgccagcaggcggtagagatagagcggtcctcccgcttttggcccggtgccggacaggccttcgccgccaaacggctggacgccgacgaccgcgcccaccatattacggttaacgtacaggttgccgacatgggcggaaccggtgacttgcgcaatggtttcatcaatacgggtatgtacgcccagcgttagcccgtagccggaagcgttaatctgttcgataagctccgccagttggttacggttataacgcacgacgtgcagcacgggcccgaagacctctttttccagttctgcgaagttttccagctcaataagcgtgggcataacaaacgtaccggtctgccattcctgcgcatcatcgctgttttcacgtgcggcctggaaaaccgggcggcctttggcgcgcatcgtctggatgtgacgttcaatgttggctttggcctcgctatcgatcaccggcccgatatcggtcgtcagacggcctggattccccatccgacactccgccatcgcgccgcgtaacattttcagcgtatgttcggcgatatcgtcctgcaaacacagcacgcggagcgcggaacagcgttgtccggcgctgtcgaaagcggaagccagcacatccacgaccacctgctcggtgagcgcggaagagtcgacaatcatagcgttcataccgccggtttccgcaatcaacggaatagggcggccctgggcgtcaagacgcgtggcgatgttgcgctgcaacaacgtcgcgacctccgtggagccggtaaacatcacgccgcgtacacgcgcatcggcggtaagctgggcgccgacggtttctccccgtcccggcaacagttgcacgacgcccggcggtacgcccgcttccagcaaaatggcaatgccctgggcggcaatcagcgatgtctgctctgccggtttcgccagaacgctgttacctgccgccagcgcggcggcgatttggccggtgaaaatggccagcgggaagttccacggactgatgcagactaccggccctaacgggcgatgcgtttcgttatcgaaatcgtcacgcacttgaccggcataataatggaggaagtctaccgcttcgcgcacttcggcaatggcgttgctgaacgttttccccgcttcacgcaccaacaggccaatcaactgctgcatttggtcttccattaataccgccgcccgctgcaaaatagcggcgcgttcttgcggcggcgtcgcaaaccaaaccggcgcctgattgaccgcgttttgcaatgcctgttcaacctcgctttctgtcgcttcgcgtccccagccaacaatatctttcggttccgccgggttgataaccggcgtcatctcaccgtcggccaccggttgttccagcacaggtttggcctgccatttctgcatggcgttgcttaacagggcagaagaaagcgaggcgaggcgatgttcattcgctaaatcaagtccggcggagtttatccgaccttcgccgtacagatcgcgcggcagcggaattttcggatgcggtatgccagcctgaccttcctgctgcgccagtttttccacggcctcgaccgggtccgccaccagttcatcgagcggtagggtggcatcggcgatacggttgacaaaagaggtgttggcgccgttttccagcaggcgtcgtaccagataggccagcagggtttcgtgtgttcccaccggcgcgtaaatacggcagggacggttaagttttccgtccgccactttaccggtgacctgttcatacagcggttcgcccatgccgtgcaggcactggaattcgtactgacccggatagtaattttgcccggccagatgataaatcgccgccagtgtgtgagcgttatgggtcgcgaactgcgggtagatcagattagggacggcgagcagttttttcgcgcaggccagataagagacatcggtatacactttgcgggtataaaccggatagccctccagcccttccatttgcgcgcgtttgatctcgctatcccagtaggcgcctttcaccagacgaatcatcagccgacggcggctacgggaggccagatcgactaaataatcaatgaccagcgggcagcgtttctggtaagcctgaatcacaaagccaatgccgttccagcccgccagttcgggttcgaagcagagtttttccagcagatcgagcgagatctccagacgatccgcctcttcggcgtcgatattgagaccaatgtcgtactggcgcgccagcagcgtcagggatttcaggcgcggataaagctcctccattacccgatcgtattgcgcgcgactatagcgtggatgcagggcggacagcttaatcgagatgcctggcccttcgtaaataccgcgaccgttagacgctttgccgatggcatgaatcgcttgctggtaagaaaccatataggcctgcgcatcggcggcggttaacgcggcttcgcccagcatatcgtaagaatagcggaaccctttctcttccagttttcgggcattcgccagcgcctgagcaatggtttcgccagtcacgaactgctcgcccattaaacgcatcgccatgtcgacgcctttgcggattaacggctcgccgctcttgccgataatgcggttcagcgagcgcgatagattggcttcgttatgcgttgagaccagtcggccggtaaagagcagcccccaggtggcggcgtttacaaacagcgacgggctacggccaatatgcgactgccagttgccattactgattttgtcgcgaattaacgcatcgcgcgtagctttgtcgggaatacgcagcagcgcttccgccagacacatcagcgctacgccttcttgcgaagagagggaaaactcctgcaacaggccttgcaccatacccgcgcgaccgctggcggatttttgattgcgcaatttctccgccagttgatacgccagtttatgcgcctgctcagcgacaggcggcgacaggcgcgcctgttccattagcattgacaccgcatcggtttccgggcggcgccaggcggcggtgatggcggcgcgagagacggattggggaagaatttgttcggcaaactccagaaagggctgatgcggctcatcctgcggcgcgaccggctcctcgctttcatttgccgcgccgacaaacagcgcaggtagctccggtagcgtatcgctattttccagcttgtccagatagctaaagattgcctgttttattaaccagtgcggcgtgcgatcgatacgcgacgcggccattttgatccgttcgcgcgtggcgtcgtccagcttaacccccatcgtggtggttcccataccctctactcctgttattcgctctatctgctaaccaatagttagcggaaaatatccaccatgttgcaactttgtgcaaccgcgttaaatgtgacctgcgttgcaagcttaaaaatgaatgaattgttaaaaaaagataagggagtgtctgacgagaaaaccatctggatttattttctctgcggtagttaacacttttaaaaggtgcaaccgcaaaaaatgtgagagagtgcaacctggagaaaaatagtatccctctgcaatcaaatttgatgtaaatggtgtgttaaatcgattgtgaataaccaccgcttccggcaggatacggtcgccctggtaaacataacacccttgccacgttccggcagggtacaaaacggcacgctacggtagtgccaataaataaatttggagaaccttgatggctattagcacaccgatgttggtgacattctgtgtctatatttttggcatgatattgattgggtttatcgcctggcgctcaaccaaaaactttgatgactatattcttggcggtcgcagtctggggccgtttgttacggctttatcagccggcgcgtcggatatgagcggctggctgttaatggggctgcctggcgctatctttctgtcggggatctctgaaagctggatcgccattggcctgacgttaggcgcatggattaactggaagctggtggccgggcgcctgcgcgtgcataccgaatttaacaataacgcgctcacgctgccggactattttaccggtcggtttgaggataagagccgagtcctgcgtattatttccgcgctggtcattctgttgtttttcactatctattgcgcgtcaggtattgtcgctggggcacgactgttcgaaagcaccttcggtatgagctatgaaaccgcactgtgggcgggggccgcggcaaccattatttatacctttatcggcgggttccttgccgttagctggacggataccgttcaggccagcctgatgatttttgcgttaatcctgacgccggtgatggttattgttggcgtaggcggtttcagcgagtcgctggaggtgatcaagcaaaagagcatcgagaatgtcgacatgctcaaggggctgaattttgtcgctattatttccctgatgggctggggactgggttacttcggtcagccgcatatcctggcgcgctttatggcggcggactcccatcacagcattgttcatgcgcgtcgtatcagtatgacctggatgattctgtgtctggcgggcgcggtggcggtgggcttctttggcattgcgtactttaacaataaccccgcgctggccggggcggtgaaccaaaactcagaacgcgtatttattgaactggcgcagatcctgtttaacccgtggattgccggtgttctgctgtctgctatcctggcggcggtgatgtcgacgttgagctgtcagttgctggtatgctccagcgcgattacagaagatttatataaggcttttctgcgtaaaagcgccagccagcaagagctggtatgggtagggcgagtgatggtgctggtggtagcgctgatcgccattgcgctggcggcgaatcccgataaccgtgtgctggggctggtgagctacgcctgggctggattcggcgcggcatttggacctgttgtcctgttttctgtgatgtggtcgcgtatgacacgtaacggcgcgctggcgggaatgattattggcgcggtgacggttatcgtctggaaacaatatggctggctggatctgtatgagattatccctggcttcattttcggcagcctggggatcgtaatctttagcctgcttggcaaagcgccgacagcagcgatgcaggaacgctttgcaaaagcggacgcgcattatcattccgcgccgccgtcgaagctacaggcggaataaccgacatgtccgatagcattattgccatcggacatattttaccaggcggcgttatacgcccgcctggtcctctgataagtcccggaccgattgactgaagatgttcaggtaaatgaggacgcactctcaaactatttttagcccttgagcgccgttaacgcgggcgtaatacatctcgagtaatcactaactagccatatatgaaatcgcctgttaatggtaccaatagccttgacgcaatagagtaatgacaaaaattaaaacaagtcagcgttactggcgtaagtatgccgcataaaattttgcataaataatgccgttttagcgatgggagagaggacacgttaattattccattttaaccttatatatgttcaatattcaatgggttatggatgttttcagcattaatacccgcagtagctaatgattatcttttttagtctcctgccgatgaaataatcgtgtaatctttctgtaagagactgacaatgacgcaataatgtttggttaatgcttggtgaatatattgttgcattattgatgttttgtgttgtacttagtagtaatagcggtagttccccggcagtgatggtcactcactatggagatcgcgaatggtaatgtccgcaccaggacacattgtttacagtagttacaacaccctgtacggacattctctctccggtggtggtcttgtcatcttaaaagctctcatcatttcccttactgaccatacccatgacgtcatatgtggtgcgcgtagccgtgtgtggcgtcgtttcaaaaagcaagctaaggcttacaaggaagccaaccctcagatgtgtgtgcgcataatcgcgttcaagagaacgcgggtgatgtatacctacaactcaaggtgctatccatgggaagacaaaaagcagtgatcaaagctcgtcgtgaagcaaagcgtgtgttgagacgagattcgcgtagtcataagcaacgtgaagaagaatcggtcacgtcactggtacagatgggcggagtagaagccattggcatggcgcgcgatagtcgcgatacctctcctgttaaggcgcgaaatgaagcacaggcgcattatctgaacgctatcgacagtaaacagcttatttttgcgaccggcgaagccggctgcgggaaaacatggatcagtgcggcaaaggcggcagaagcattgattcataaggacgtcgagaggatcattgtgacgcgtccggtattgcaagctgatgaagaccttggttttttgcccggtgatatcgctgaaaaattcgcgccttattttcgtcccgtctacgatgtcctgcttaaacggttgggcgcgtcctttatgcaatattgtttgcgcccggaaatcggtaaggtagaaattgccccgttcgcctatatgcgtgggcgtacttttgaaaatgcggtcgtgatcctcgatgaggcgcaaaatgtgactgcggcgcaaatgaaaatgtttttgacgcgattaggcgaaaatgtcacggtcattgtcaatggcgatattacgcaatgcgacctgccgcgcggcgtgcgttccgggttgagcgatgcgttggaacgctttgaagaagatgaaatggtagggattgtgcatttcaacaaagacgactgcgtgcgctcggcgctttgtcagcgaacgcttcacgcatacagctaatatagcattgactttcagagcccgggaaaccgggctttgttatctataaagcatccagcagactcatggacaaaaaaggaaaatgacgcctgtacgtgaagggaattattttgtcatgtccagggcattcattgtccgtaatttgctttctcgggcctgttccggcgaggactgtacaagaagggtatagagcaggtcaaagacgaaaagctgcgcggctttcgtaccgatcgagtcaccctgcaacattccttgccgattaccattgatcaggcaaaaatcggcctcttcacataatggagaacccagattatgggtaatggcgactgtggtggcgccagcctgtcgggccaatcggagtgaatgcactgtttctggcgatgtgcccgagtgactgacacccatcgcgacatcgcctgcttttaatagcgtagcctgcatgtacataaaatggttattgcttaccgcatcgccccgtaaaccaatacgcattagcttgtgtttcatatccagcgccgtgatccccgatgagcccacaccaaagatataaactgagtgacagtgacgtagggcatccacgacaccgagaacctgttgcatatcaagcagatttagcgtttcagataatacattactaatggtgttctgcaattttaaaccaatggcgtgggcatcgtcggattcgctaacttcggcatccagtagaggactactgtcatcagactcggtagtggcaagttcaatggccaggtccattttaaaatcctgaaaacctttatagcccagggtgcgacaaaagcgaataaccgtggcttctccggcctgtgtttcgcgcgacaaatcggcaatagatgactgtgtcacctgtctggggaaggctaaaatatattgcgcaatacgctgggaggcacgtgtcaggcttttttgcatagcacccagagtatcaaggatttttccgggtttaagacgtgggggttgaggctccatatagttcctgctcttgagggctgattgcggcacaaagcctgcaatatcgaacagagcagagcctatcaagtctgcggcatgaaaaaaagcgcgatgtaagtaaaggagggggaatatttacatcgcgttgccaacttatgacagaacatcactggagagtaatctgttgctcttacggtgtttatagcgcgccatttgacggatggtttatacctggcccggtattgtcgccccgcgcgttggcgtcaccgtatgctgtgtcggtatagcgtggtatcatgaaatcataatgtcacctttggttcaggtttttcatccagcgtcaatggcggtgccggggcaaataacggggcgaaaataacgccgctgatcaccacgcttagcgagccaatgaccccataaaagaagaagttaaggtcagtggcatagcgtgcgcccagcacggtaatgacgctgataataattcctaaaaccgcactcccggcatttgctcgtttaaagaaaatgcccagcatgaacagaccggtcattggccctcccatcagacctatcagactattaaatgcatcccagatttctgattcatcggccatgaccagccataccgaggccgcgctacttatcaagcccgcgaccagaataactaacttagctattttcatacggttttctggcgttctttttttatgactcaaacgctgatagatatcggaattaaaacaactggaaatgctgtttaagctgctggagatactggactgcgcagcagcgaaaatagcggcgattatcaaccctgcaatgccgactggcatttcggtgaccacgaataagggcaaaatgccgccagtgttgaatcccgccggtaataattgtggatgttgctgataatagacaaacaatgccgagccgatagcaaaaaagaaaacagggatcacagcaaccagtttggcatttgtaagtaatgttttcttcgtttcctctatggagtcagtcacgatatagcgttggaccacatcctgactggcagtaaattgctgaatattggcaaacagaaaaccaatcatcaatacaggtactgtgctttccgtccagctccagtggaactgcgtagccggaaagaatttatccgcctgctgcgtcaccgtaaaaatttcatcaatgccgccctggactttgagacatatcactataaaaatcagtatcgcgctgccagaaagtaagaggccttgaataacatcagtccatattactccttcaattccacccatccaggtataaatgatacacatcacgctaatcaacagtaccaaaatcaccgggtctatagcgatgaaggggcgcaaggccagcacggtgaggaaagtgataatggcgatacgtccaatatgaaacaacataaatgacatgctggcgaacagacggcagcgcacatcgaaccgtgcttcgagatattcataggctgatgtgactttcaatttccgaaaaaacggaatatagaaataaaaaaccagcggtaaaattgcgatagccagatactgaccaatgataaacgtccagtcggaagtaaacgctttggcaggaattgacataaatgtaattgagcttaacgtagtagcaaatacactgaccccagccgcccaaccaggaacccggccaccaccgcgaaaataatcgtctgctgttttttgccgtctggaaaaatagacaccgactaacatcatggccaggaggtagccaaataatacaagataattaacgatgccgaaagaatgtgtaatcatagttctttcctgcttatggttttgagtagagttgcggtcatcgtctgtgtatttttatcttcccatcattcagacgatacgatattcagatcaagtaatagtttttgttaatctcaatgacggtaatcatgagatgtaaaaggcagagcatttatgctccaccaatggtgatgcccagacgtatgtcctgccggatacctgaaatagcagatatccgatattgcgttcaaacaggcttcaggcctgggtctcgtatttgccgatagcattattaacgtcggattattctctgaggcataaatatcaatagtaagcgtgttcattttcttttcctgttcagcgttttactgcgtgactgaaccactgacagatatgctcaatacgggtgatagcggaaccaacggtaactgcccaggcaccatgctcaatagcattggccgccagtgcaggcgtgttatagcgcccctcggcaataacacgacaacctgcatggctcagttgtgtcaccattgccaaatctggctcaaccggcgtgatggggccggtatagccagacagtgttgtaccaatgaattcgattcctttctgatggcaacttatgccttcattcacggttgaacagtctgccatcgccagtaatccatgcaggcgaatacgtgtcagtaaactatcaatatcaaccgggcgagagcggaatgaggcatcaaaagcgataatatcggcacctgcctgcgccagggcgtcaacatcctgtaaatatggagtgatacggactggcgaccctgtaaggtcacgtttaattatcccaataataggaacagaaagatggggacgaacagtccgcagattctcaatgccttcaatgcgcacagcgaccgcacccgccgaagccgctgcctgtgccattgcagccacaatttcaggtttatccatagggctgcctggtaccggttggcatgagacaatcagcccaccgttttcgtgtacactttgttccagcctggctaatagtgacatccagttccgccttatatatttgaagttttgctccgttttatgttatgtcttggagtgttgctacatcaagcaaaaagatagaaaaatgtgaacacagtcataaggtatgtttgttattcaattactgcgccagcggatttgaggctataacctgaagctacaagacaaatacaattcattctgacggcagcatgctgtattttattaactgcttccggcataaagataaaatgctcagaaggagcttatacgccacgggatagccagtatgaaatgcatcacataattcttgttgtatttattcagaatgctatcactaatgagtttggccataacagatcacccataatcacttctaacatcaccatggggtgcttttacctcgcacatgataactccatgtaattatttttagcgcttggtcacattttgtcattgtcattgttgaaattgtgcaccataagatcactaatgatgaagctttactccaattgtatttcttcgcatggggatgcagatgaaaaattttaagaaaatgatgacgctaatggcgctatgtttctcagttgctatcaccacatcaggatatgcaacgacgcttcctgatataccagaaccactgaaaaatggtactggcgctattgataataatggcgtgatttatgtcggcttaggtaccgcagggacatcctggtataaaattgatcttaaaaagcaacataaagactgggagcgtataaagtcgtttcctggtggagctcgtgagcaatccgtgtcggtatttttaaatgatgagctttatgtttttggtggcgtagggaaaaaaaacagtgaatcaccgttgcaggtttatagcgatgtgtacaaatactcaccggtgaaaaatacatggcaaaaagttgacactatatctccagttggattaacagggcatacgggagtaaaattaaatgaaacgatggtacttattaccggaggggttaatgagcatatctttgataagtattttattgatatagcggctgcggctgcggatgaaagtgaaaaaaataaagtcatctataattattttaataaacctgccaaagattatttttttaataaaatcgtatttatctacaatgctaaagagaacacatggaagaatgccggtgagctgccaggcgcggggacggcaggatcgtcatcggtaatgggaaataatttcctgatgctgattaatggtgagctcaaaccgggtttacgtaccgatgtgatttaccgcgccatgtgggataacgataagctaacatggttgaagaacagccagttaccgccatcgcctggagaacaacagcaggaagggttggccggagcattttcgggctatagtcacggtgtcctgcttgtcggtggtggcgcgaattttccgggagcaaaacaaaattatactaatggaaagttttattcccacgaagggataaataaaaaatggcgagatgaagtctatggtttgattaatggtcattggcaatatatgggtaaaatgaaacaacctctcggctatggtgtatcagtaagttatggtgatgaagttttccttattggtggtgaaaatgctaaagggaaacctgtttcgtctgtaacctcctttaccatgcgtgatggtaatttattaataaaataattttttaaatacaaaaataaagttaattgatgagcggagtattttatgaaaatcaacaaatatcttctgggtatggtttcgtttatagcattttcatcatatctacaagcggcaacccttgattatcggcatgaatatgctgatagaaccagaattaataaagaccgtattgctataattgaaaagcttcctaacggcattggtttttatgtcgatgccagcgttaaatcgggaggagtagatggtgagcaggataagcatttaagcgatctcgtcgcaaacgctatagaactgggcgtaagttataattataaagttacggacaattttgttttgcagcctggatttatatttgaaagcggtccagacacttcaatttataagccttatttaagggggcaatataattttgattctggtgtttatatggctggtcgttaccgttatgactatgcaaggaagacagctaactatagtgatgatgagaaaacgaatagatttgatacttatataggttatgtttttgatgagttgaaattagaatataactttacctggatggatagcgatcaaattaaatttgataacaaaaaaacaaactatgaacataatgtggctttagcctggaaactgaataagtcatttacaccatacgttgaggtcggaaatgtagcggtgagaaataataccgatgagagacagacccgttatcgcgttggattacaataccacttttgagaaaggttaaagagttactgtactaatctttgcttagtattcatatcgataatcttatagcccgtagctacgttacagaacgttagactttgtcttgagtattcacgtccttaacgtagctacgaacaaggatgataaacaatgaatatacgccttacatagctacgatctcaggcggttgtcggaaagtgccgattgatagtgtcttattcggcaattgatatgacttaaaaattaattccgtaagcatttcagacggtaacagcaaataagggttttattgtgatagcaaaattcttcccgtggtatagcgagataactcgtccacaaaaaaatgctttattttcagcatggctgggttacgtttttgacggcttcgactttatgctgattttctacattatgtatctgatcaaggctgacttaggattgacagatatggagggcgcattccttgccacagcggcctttattgggcgaccatttggcggggcgctatttggtctgctggcagacaaatttggccgtaagccgttgatgatgtggtcgatagttgcctattctgtaggtacagggttaagtggcctggcttccggtgtaattatgctgacgcttagtcgcttcattgtcggtatggggatggcgggggagtatgcttgcgcttctacttatgccgtggaaagttggccaaagcatttaaaatctaaagcgagcgcatttctggtttcaggtttcggtattggtaacatcatagcagcctattttatgccgtcatttgccgaagcgtatggttggcgtgctgctttttttgtcggtttgctacccgttcttttagtaatctacatccgggccagggctcctgaatctaaagagtgggaagaagctaaactcagtggtcccggaaagcattcacaaagtgcctggtcagttttctctttgtcaatgaaagggctatttaatcgagctcaatttccactgacattatgtgtatttattgttctgttctctattttcggcgcaaactggccgatctttggtctactgcctacatatttgacgggagagggctttgatacgggcgtggtctctaatttaatgacggcggcggcattcggcactgtattgggaaatatcgtttggggtctgtgcgcagatagaattggtttgaagaaaacgttcagcattggtcttctcatgtcctttttattcattttcccgttattcagaattccgcaagataattatttactgctgggcgcatgtttattcggtttaatggcgactaacgtaggtgttggcgggttggttcccaaatttctctacgactactttcctcttgaggttcgtggtttgggtaccgggctgatttataatcttgctgcgacatcaggcacattcaattcaatggcggcgacctggcttggaataacaatggggctaggcgctgcgctaacgttcattgttgctttctggaccgcaacaattctactcattattggcctatccattccggatagactaaaagcacgtcgtgaaagttttcaatcaacaaaagaattttaatagaggataaatgatgacgaaatacggtgttgtaggtacaggttattttggcgctgaactggcgcgatttatgtctaaggttgaaggggcgaaaatcactgcgatttacgatccggtaaatgcggctccgatagcgaaagagttgaactgtgtcgccactgcaacgatggaggcgctttgttcccatcctgatgtggattgcgtaattattgcttcaccaaattacttacataaagcgccagtcattgcggcggctaaagcgggtaaacacgtgttttgtgaaaaacctatcgccttaaattaccaggattgtaaggatatggttgatgcctgcaaagaagctggtgttacctttatggcgggtcacgttatgaacttttttcacggggttcgccacgctaaagcgctcatcaaagctggtgaaattggtgaagttacacaagttcacactaaacgtaatggttttgaagacgtgcaggatgagatctcatggaagaagattcgcgcaaagtcaggtgggcatctgtatcatcacattcacgagctagattgtacactgttcatcatggatgaaaccccatccctggtttcaatggcggcggggaatgttgcgcacaaaggtgaaaaatttggtgatgaagatgatgttgtcctaatcacccttgagtttgaaagcggtcgtttcgcgacacttcagtggggatcatcgttccactaccctgagcactatgtattaattgagggcacgacaggtgcaattctcattgatatgcaaaacacggctggttatctaataaaagcgggcaaaaaaacacactttcttgtgcatgaaagccaggcggaggatgatgatcgtcgcaacggtaacatatccagcgagatggatggcgcaatcgcttatggtaaacccggtaaacgtacgccgatgtggctctcatcaattatgaaactggagatgcagtacttgcatgatgtgataaacggtctggagccaggcgaggagtttgctaaattgctaacgggagaagcggcgacaaatgccattgctaccgctgatgctgcgacgctttcctcaaacgaggggcgcaaagtaaaactcactgaaattcttggctaaaattgaaagccggatggtggtgttattggccggtggcgctgcgcttatgtagaccggataaggcgcccgtgaactgtgccgccatccggcaatggacggggcacatataagcaaaaagcccgtacttctgtacaggctctcaacttaaatatggcggtgagggggggattgactcgctgcgctcgcccttcgggcagtctcctcgcaagctcgtcgtctgtccaactggctgcgccagttgtcgaaccccggtcggtggttctcatccccccttggtttgggggatacatataagcaaaaagcccttacttctgtacaggctctcaacttgaatatggcggtgagggggggattgactcgctgcgctcgcccttcgggcagtctcctcgcaagctcgtcgtctgtccaactggctgcgccagttgtcgaaccccggtcggtggttctcatccccccttggtttgggggatacatataagcaaaaagcccttacttctgtacaggctctcaacttgaatatggcggtgagggggggattgactcgctgcgctcgcccttcgggcagtctcctcgcaagctcgtcgtctgtccaactggctgcgccagttgtcgaaccccggtcggtggttctcatccccccttagtttgggggatacatataagcaaaaagcccgtacttctgtacaggctctcaacttaaatatggcggtgagggggggattcgaacccccgatacgttgccgtatacacactttccaggcgtgctccttcagccactcggacacctcaccaaattgtcgctccagcattactggaacgggcgctaatgtagggaaatatccattctacgtcaatcaacttttttcaaaaaaaagcgcgtttatacaaacttccaccaatctgtggttttaataagcgaaaactgctttttttgcccgcgccgggaaatttgctatgctgcacatcccgttgaaaacgctgataacaggcgcaatcacattccgcacaatactgctcaggagataacatggagataattttttatcacccgacatttaacgccgcctggtgggtaaatgcgctggagaaggctctcccacatgcgcgcgttcgtgaatggaaggtcggtgataacaaccccgcagactatgcgcttgtatggcagcccccggttgaaatgctggccggaagacgcttaaaagccgtctttgtgctgggcgcgggggtggatgcaattctgagtaaattaaatgcgcatccggaaatgctggacgcctccattcctctattccgtctggaagataccggaatgggcctgcaaatgcaggagtatgccgtcagccaggtattacactggttccgtcgtttcgatgattatcaggcgctgaaaaatcaggcgctatggaaaccgttgccggaatatacccgcgaagagtttagcgtcggtatcatgggcgcaggggtactgggcgcaaaagtggcagaaagtctacaggcgtgggggttcccgttacgttgctggagtcgtagccgcaaatcctggcctggcgtggaaagttatgtagggcgtgaagagctgcgcgctttcctgaaccagacgcgggtgctgattaatctgctgccgaatacggcccaaacggtaggaattattaatagcgaattgttggatcaattgccggatggcgcttacgtgctgaatctcgcgcgcggcgttcatgttcaggaggcggatctgctggctgcgcttgatagcggtaagctaaaaggcgcgatgttggatgtctttagccaggaaccgttaccgcaggaaagtccattatggcgccatccgcgagtcgccatgacgccgcacattgcggcagtcacccgtccggcggaagccatcgattatattagccgcaccattacccagctggagaagggagagccggtgacggggcaggtggatcgggcgagaggatattgatacaacccggcgcgggccgggtttcgctaaaaaacgctggcgatacctgctatccttgtcggaaatgactacaggagagagcaatgtatcccgttgacctgcatatgcataccgtcgccagcactcatgcctacagtactctgagcgattatatcgcggaagccaaacgcaaaggcattaaactttttgcgattaccgatcatggtccggacatggaagatgcgccgcatcactggcattttattaacatgcgcatctggccgcgtctggttgacggcgtggggatactgcgtggcattgaggcgaatatcaagaatattaacggtgaaattgattgttccggaaagatgttcgactcgctggatctgattatcgcaggctttcatgagcccgtttttgcgccgcatgataaagaaaccaatactcaggcgatgatcgcgaccatcgccagcggcaaggtgcatataattagtcaccccggaaatccaaagtatccagtggaggttaaagccatcgcgcaggcggcggcgaaacaccatgtagcgctggaaatcaacaactcttcttttctgcattcgcgtaaaggaagcgaagataattgccgcgcggtcgctgccgccgtacgcgatgcgggaggctgggtagcgttaggctctgattcccatacggcctttacgcttggcgatttcaccgaatgccggaaaattctggatgcggtgaattttccggaagatcgaatcctgaacgtctcgccgcagcgcttactggcctttctcgaatcacgcggtatggcgcctgtaccggaatttgccgaactttaatcgttatttacgggaagatatcaatgaatgagttttcaatcctgtgccgtgtgctgggatcgttgttttaccgccaaccgcaagatcctttactggttccgctgtttacgttaatccgtgaaggtaaactggcggcaaactggccgctggagcaggatgacatgctggcgcgtttacagaaaagctgcgatatcacgcagatttccactgattacaatgcgttatttgttggggaagagtgcgcggtagcgccataccgcagtgcgtgggtcgaaggcgcggaagagtctgaggtgcgcgcttttttaacgtcgcgagggatgccgctggccgatacgcctgccgatcacattggcactttattgctcgcggcctcctggctggaagatcagtctgccgaagatgaaagtgaagcgctggaaaccttatttgccgattatctgcttccctggtgcaataccttcctcggtaaagttgaagcccatgccgttacgccattctggcgcactctggcgccgctaacgcgtgatgcgataggggccatgtgggatgaacttcaggaagaagatgaagaataatgtgatgtaaatcacccttaactgcaacgggttttacatcattgcataaaatgtgtgcgtgatctcattaatgtgccgcttttctgttatgatgcgcgccatgaacatacttctttctattgctatcacgacgggcatcctttctggaatatggggatggggggctgtctccctggggttactaagctgggccggttttttaggctgtacggcttatttcgcctgtccgcagggcggctttaagggattgttgatttccgcctgtacgctgttaagcggtatggtgtgggcgctggtcattattcacggtagcgcgttggcgccgcatctggaaattgtcagttacgtgttgacggggatcgtggcattcctgatgtgtatccaggcaaagcagctattgctttcttttgttccgggaacatttatcggcgcctgcgcgacatttgcagggcagggtgactggcggttggtattaccgtcgctggcgctggggctaatctttggctatgccatgaaaaatagtgggctatggctggcatcacgccgcgagcaacattcagcgaatacggcggtcacaaaataaaaaagcgtggggttcttccccacgctttgtcgtattcatcaggattctggcggtactgacagctcacggtatttcaccagaatatcattttgcctgtccgctttattctgcaaatcccacagtccgcgatcgataccatcattaatgaggaagataacgccggtttcaatggctgacatcagacacagcatcaccggttcgttcgaggtatagccgatttcgccttccagtaagcgctggtaatcaataaaacggaacacgcctgcctgtacttcataggaaaggatcgttttactggtgttcaccgaggaaaggatctcgcccgtactgacgttaaccacgcgcaggttgacagcaatctgatccagctgatactgcgtatcggcgccaataccgaaatatcttgcgccgaccccgccggatttgacgttactttcataaccaataatagaaccttccaccataatatttgccgccgtcagcgactgaagcgggatacggttattcatcgccacggtgccgttttcctgggctgcgcgaataattttccgttcattcaaaagattctgtaagccttgtcgttccagcgggataaaccagcgcgaatctttcagcgcagtgaccaacatagcggtggcgctctgcggcacagccgtagaaaagttacttgccgggtaaggtttaaattggcccgtttcatcctgaatgttatataccgaaacaaagatcttaccggtgggagcaggtaagtgcgtcaaatctttgtaactttgtgcgcggggcattaatgtcggtttcgcagcttgtttcggcggggcagttaagcatccgctcaacaataaaacggcaaccaaaataagtaagcgcggcatgatttatatcctttagtgactgtagcttaaaaatcggttgactgagtttgtaaacctgacacttcgatggtcgaggttcttcccgtttttctgtccgtgacgttgagctggagctgtccgtcgcgattagcgatatcgataataaaatcgttggtcaccatacgtcctggtttcccggtattaatattggtcaacaagccgcccagaatttgcgattgaatagcctgcgtaaagttatccaacgctgagggggtttcgataccaaaatcgttatcataagcggggtctttatatgaattttgcgcctgggcgctattcaataaaaaggaaccgttattggggtttccaccaaagttaggattacggaactggaacgtcatatttccagcccaggttaatggcgaaaaaagcatgagcagcactactgcatgtttaacacgcatgacagcctccggataaaaatcatgttttagaattcatcacgcgctaaatcactcgtacttaatagcgtttgatctatttgtcggcgatttaatgcttcctctgtttgcgctaatgcgaagacgacggttttctcgaagtctcttttcattggaaataaaaaggtctggaaaataacgtcctgatttaccgttatggtgatccagcttccccaacgcgcactgggtctttcattaatggtcagattgccggtgtattcgctttcccatttgtcgctgaatgcacgatagaattcatgtcctatcgaagagacggtatggtcggttaacaatccgggaacctcgacttcaacttcattggcatgcaggtttccggtagcgaacagtaactctgctgctacaatccaggtcagatagcgtttcatggccttaccgcctgagattatcgtttgcccatgaaactgcctgggtgcgatttttgacagctatctttttgaaaagattataaagatgtgtcttaaccgtattctcgctgataaatagcgacctcgcgatttcattattagaggcaccaatacgtaacttattgaggatctctttttcgcgatgagtgagtaatgcggactcggtgctgttgtagcggtaatttcctgagtgcgtaatcaggtaactggctaatttttgtgaaaaatagcattcgccacgcagaataccctgtaatccgctgaccacgtgttcctggtcttcagtagcgtaaaacacgccgttaatatgaggccagttttcaatttcacggtagggataatcgtcaggggtatttaacaataatgtttttatattattgtttttgcggcttaaattatcctgccaatagtggataagcttcttatccgcttccatcatatccattaaaacaatgcaaccggccgagatatcttccagagaacgttgaatattatgcagttttccggttatggccagcgattgctttaaatgttgcaataatgccgtagcttgcagagatggctttgtgatcaacaatagtgtgtgaccatgactactatggacttcattaaacatgatgaaactccactttttttaatcgcacatctgacagctgcccccataaaataaaggcaccagaagtactgacagatgttgcactgctgtgggttgaaatagcccattatccagaaagagaaaaatatttacgaaaatacttttaactgttttcaatctagccattacaaatcttaaagcaagtgttaaacttgtaaccaaatgtaaaaatatatattaaaatgttgtttttgggtttttttgaagtttagatttgatagtaaagttgtacatttcgctgttattgcatagatttaaaaaatcatacaaattataataattcattgatttttaatcattttaattattatatgttatgttttgattttattttttcttaaaatttgagacgtggcattaacctggacagcacaaagacaaaaaaaacgaagtgtgtcacgtcttgtgcgtattgccccacatgggaagcataagaacatccccatggcggcataacacacaccaacacttcattttttaggtgcgcgatacactatcttctgtggccaaaaatcaattataaaaaatcacatggctatcgttttattagcactttggtatgagcttaaataacaaaataccacgcgtgggtgagttattaaaaatgtttccacggacatactcttcatcgtaacgacgcgttaacaaaaaacgcatgtcgctaacaaggtaatagataattttcgctatgtacgaccaggtccagggtgacagcatgaaaaacaaattgttatttatgatgttgacaatactgggtgcgcctgggattgcaaccgcgacaaattatgatctggctcgttcagagtataattttgcggtaaatgaattaagcaagtcttcatttaatcaggcggccattattggtcaagtcggcacggataatagtgccagagtacgccaggaaggatcaaaactattgtccgttatttcacaagaaggaggaaataatcgggcgaaagtcgaccaggcagggaattataactttgcgtatattgagcaaacgggcaatgccaacgatgccagtatatcgcaaagcgcttacggtaatagtgcggctattatccagaaaggttctggaaataaggccaatattacccagtacggtacgcagaaaacagcagttgtagtgcagaaacagtcgcatatggctattcgcgtcacccaacgctaataccgttacgacttttaaatcaatccgatgggggttttaccatgaaacttttaaaagtggcagcattcgcagcaatcgtagtttctggcagtgctctggctggcgtcgttccacaatggggcggcggcggtaatcataacggcggcggcaatagttccggcccggattccacgttgagcatttatcagtacggttccgctaacgctgcgcttgctctgcaaagcgatgcccgtaaatctgaaacgaccattacccagagcggttatggtaacggcgccgatgtaggccagggtgcggataacagtactattgaactgactcagaatggtttcagaaacaatgccaccatcgaccagtggaacgctaaaaactccgatattactgtcggtcaatacggcggtaataacgccgcgctggttaatcagaccgcatctgattccagcgtaatggtgcgtcaggttggttttggcaacaacgccacggctaaccagtattaatttagcgtctgcgctaataaaaaaacagggcataagccctgttttttttcgggaggaaattatgcatactttattgctccttgccgcactttcaaatcagattacgtttaccacgactcagcaaggcgatatttacacggtgatccctcaggtcacattaaacgaaccctgcgtctgtcaggtgcaaattctctctgtgcgcgacggcgtcgggggacaaagccatacacagcaaaaacaaacgctatctttacctgctaatcaaccgattgagttgtctcgtcttagtgtaaatatatcttcagaggactcggttaaaattattgttactgtttcggacggacaatcactgcatttatcacaacaatggccgccttctgcacagtagtttttgatggtggcggaaatggattggctgacctgggtataaagaggcgataaaagcgtctcatcgtctcggcatgtcgctataaggtaacgccgaaccctcgaggatgactaatcattgaggagttaacatgtccgtaatcaagaaaaatatccctgccataggcctgtgtatctgcgctttttttatccattctgcggtagggcaacaaacggtacagggcggcgttatccattttcgcggcgcgattgttgagccactgtgcgatatttctactcacgccgaaaatattgatttaacctgcctacgcgaaggtaaaaagcaaatgcaccggattgaccttcggcaggcatctggattaccgcaggatattcagtccattgcgacggtacggctgcattatctcgatgcgcaaaaaagcctggcggtgatgaatattgagtaccgttaacggcggtgtcatagatataaaaagagcgactctgttgaaagccctgctgtacactttgcagataaggtgagacaaaggggggggggttatgacatcacgtcttcaggtcatacagggtgatatcactcaacttagcgtcgatgcgattgtgaatgccgctaacgcatcattaatgggcggcggtggcgtagacggcgcgattcatcgcgcggcggggccggcattgctggacgcctgtaaactcatccgtcagcaacagggcgaatgtcagacgggacatgcggttatcacgcctgctggcaagctttcggcaaaggcggttattcacacagtggggcccgtctggcgaggcggcgaacaccaggaagctgagctactcgaagaggcataccggaattgtttgctgcttgccgaggcgaatcactttcgttccatcgcttttccggcaatcagtaccggcgtttatggctatccacgcgcccaggccgctgaagtcgccgtcaggacggtttcagattttattacccgttacgctctgcctgaacaggtatactttgtctgttatgatgaagaaactgcccggctttacgcaagattacttactcagcaaggcgacgaccctgcctgataaaacacgcctggagcgtgccgttgaaccgctatgcgcgcgccatcccggagagtgcggcattctcgcgctggataacagtctggacgcttttgccgcccgctaccgcctgaccgaaatggcggcgcggacgctggatgtgcagtattatatttgggaagacgatatgtccgggcggctgctcttttcggtactgctgtcggcggcgaagcgcggcgttcatgttcgtctgctgctggatgataacaatacgcctggtctggatgatacgttgcgcttgctggatagccatcctaatatcgaagttcgtctgtttaatcctttctcttttcgtacgctacgcgcgctgggatatttgacggattttgcgcggctgaatcggcggatgcacaataaaagttacactgccgacggcgtagtgacgctggtcggtgggcgcaacatcggcgatgcctatttcggcgctggcgaggagccgctattttccgatctggacgtgatggccattggcccggtggtcaatgatgtcgccaatgattttgaacgttactggcgctgtagttcagtgtcgacattgcagcaagtattatccctttctgagcaggaactgacgcagcgtatcgaacttcccgaatcctggtataacgatgagatcacccgccgttatctgcataagctggaaaccagccagtttatggcggatctcgatcgcggaacgttgccgctgatttgggcaaaaacacgcttgcttagcgatgacccttctaaaggcgaggggaaggcgcagcgccattcgcttcttccgcagcgattatttgacgtgatggggtcgccgacggagcgtatcgacattatttccgcttactttgtccctacgcgcgcaggcgtggcgcagttgcttaatctggtcaggaaaggcgtgaagatcgccatcttaactaactctctggcggccaacgatgtggcggtcgttcacgcagggtacgcgcgctggcgcaagaaattactgcgctatggcgtggagctctacgaactgaaaccgacccgcgaacatgaaaccgccgtacatgatcgcggactcaccgggaactcaggttccagcttacatgctaaaacgttcagtattgatggtagtaaggtgtttatcgggtcgcttaattttgatccccgttcaacgcttttaaataccgaaatgggctttgtcattgaaagtgaaacgctggcgacgcttatccataagcgttttacacagagccaacgcgatgcggcctggcaactgcggctggatcgctggggacgaattaactggatcgatcgtcagcaagaagaggaaaaggtgttaaagaaagaacccgctacgcgtttctggcaacgagttctggtacggttggcggcaattttacctgtggaatggttgctgtgaacccacgcgcggaaaactacccgatcgtggcgcgactttctcgttttaccggcggtttacctgaaaagagaaatttcaggagcgggatgcgtaaatgaatttcatacagaattaacgcaatacccataacaaatatcagcccgcacaagaacccgatcaggttggaggagatatgcggcgtaatatacgcgccaaagaaaagcgttaagggatgatgcaccagatagataaacagcgaagcattcacgaaataggtgacacgcgcggactgaaagtttaacaagcgatgccccagtgaaaataccacgttcaccatccatagccccattaccatcgtaatcacggattcggtttcgtacatccaggcgtcgccgctcccataacgttgattcagcagatacgcgataaaagcaacggcagcgcctaaagtgcatccgcgtgagggcgtggtgaagcgcgctttcagatcggggtgaatgaaggccaacgcgccgagaataaaaaacggcacataaaatagcgtttgcatcacaataaaattgaacatgccgtcactgaggattgccggatatacgatgaatataatgcgcctgatagcagcgtaagccacccccagcaggaaaaaaataagcgaaagtttggccagcgaaatagcggcgggacgaggcttgcttgtttcctgccttttttggaaccaggtaaaaatcccgatgctgacggtggttaatatcaccagcaccagtaaaaaccacagatgtgaaatgagttcccacgctaacgtattatatttttcataggcagagagtgtaggccagttctctgttttctctttgacatattgcaacaggataaattgcggcaaggtaagcaaagggattgcggtaagcatgggaatacccacacgttctacccgtactttccaccagtgttttaatggataacgtaaaaataacatgtacgaaaaataaccagaaataacaaaaaacacctgcatacgaaaagcgtggataaaatcgttaaacagggttagccaccacgatggcgcggcgctattgacatgccaactgtgagtggaatagatcaacgagatatgaaagggaatccctaacaacatcagccatgcgcggatagagtcaagaaaatattcacgcggcgcgggtacagagctcatataaggtcacgtattctcagatttttcaccttatccataaggcgaattatagttacattcggtagcaaccctacaccaactccgacaacctgtctccaggataagcacgcaaagtgaaaacaggcgcgggaggtgcttaatccatgagccagcgcgctgaacaaagcctggattcagttgtcgtaatgcctgattatccattaaaatggatcggatcgatataagcacacaaagggggaagtgcttacttattatgaaacataaacgacaaatgatgaaaatgcgttggttgggcgcagctattatgttaacgctctacgcatcatcgagctgggcgttcagcattgatgacgtggcaaaacaagctcaatctttagccgggaaaggctatgaggcgcctaaaagcaacttgccctccgttttccgcgacatgaaatatgcggattatcagcagatccagtttaacagcgataaagcctactggaacaacttaaagaccccttttaagctcgaattttaccatcaggggatgtacttcgatacgccggtcaagattaacgaagtgacggcgacgacggtcaaaagaatcaaatacagcccggattacttcaattttggcaatgttcagcacgataaagacacggtaaaagatttaggcttcgccgggttcaaagtcctgtaccccattaacagtaaagataagaacgacgaaatcgtcagtatgcttggcgccagctatttccgcgttatcggcgcaggccaggtatatggcttatctgcgcgcggcctggcgattgataccgccttaccatctggtgaagagtttccccgctttcgcgagttctggattgagcgtccaaaacccaccgataagcgtttgaccgtctatgcattactcgattctccgcgcgcgaccggcgcttaccgttttgtgatcattcctggccgcgataccgtggtggacgtgcagtcaaaagtctatctgcgcgataaagtgggcaagctgggcgttgcgccattaaccagtatgttcctgtttgggccaaaccagccgtcgccgacgaccaactatcgtccggaactgcatgactcgaacggcttatccattcatgcgggtaatggcgagtggatttggcgtccgctgaacaatccaaaacacctcgctgtgagcagctatgcaatggaaaaccctcagggattcggcctgttgcagcgtggtcgcgagttctcgcgctttgaagatttagacgatcgctacgacctgcgtccaagcgcctggattaccccgaaaggcgactggggcaaaggtaaggttgaactggttgaaattccgaccaatgatgaaaccaacgataacatcgtcgcttactggactccggatcaactgccggaaccgggtaaagagatgaacttcaagtacactctgaccttcagccgcgatgaagataaacttcatgcgccggataatgcctgggtgctgcaaacacgccgctcaacgggcgacgttaaacagtcaaatctgattcgccagcccgacggcactattgcctttgtggtggatttcgttggcgccgacatgaaaaaactgccgccggatacgcccgtcgctgcgcaaaccagcattggcgataacggtgaaatcgttgacagtaatgtacgctataacccagtcactaaaggctggcgtttaatgctgcgcgtgaaagtcaaagacgcgaagaaaaccacggaaatgcgtgccgcattggtgaatgccgatcagacgctaagtgaaacctggagctaccagttacctgccaatgaataaaacaactgagtatattgacgcattgctgctttctgaacgtgagaaagcggcattgccgaaaactgacatccgcgccgtgcatcaggcgctggatgccgagcatcggacttactcgcgagaagacgattcaccgcagggttccgtaaaagcccgccttgaacacgcctggccggattcattggcgaaggggcagttaattaaagatgatgaagggcgcgatcagttgcaggctatgccaaaagcgacgcgctcttcgatgtttcccgatccctggcgaaccaacccggttggccgtttctgggatcgtctgcgtgggcgggatgtaacgccgcgctatgtttctcgtctgacaaaagaagagcaggcgagcgagcaaaaatggcgtaccgtcggcactatacgccgctatattttgttaattttgactctggcgcaaaccgtcgtcgcgacctggtatatgaagaccattctgccttatcagggatgggcgctcatcaatcctatggatatggtggggcaggatatttgggtctcctttatgcagctcctgccctacatgctgcaaaccggtatcctgattttgtttgccgtgctgttctgctgggtgtcagccggattctggacggcgctgatgggcttcctgcaactgcttatcgggcgcgataagtacagcatctccgcgtctacggttggcgatgagcccctcaatccggaacaccggacggcgctgatcatgcctatctgtaatgaagacgttagtcgcgttttcgccggtctgcgcgcgacctgggagtccgttaaagccacaggcaacgccgcgcatttcgacgtctatatccttagcgacagttataacccggatatctgcgtggcggagcaaaaggcgtggatggagcttatcgcggaagtgcagggcgaaggccaaattttttaccgtcgccgccgccgccgtatgaaacgcaaaagcggcaatattgacgatttttgccgccgctggggcaatcagtacagctatatggtggtgctggacgcggactcagtgatgagcggcgagtgtctgagcggcttggtgcgcctgatggaagcgaatccaaacgccgggattatccagtcttcgccgaaagcgtcggggatggatactctgtatgcccgctgccaacagttcgcgacccgcgtctatgggccgctgtttaccgccgggctgcacttctggcagttgggggagtcgcactactgggggcacaatgccattatccgcgtgaagccgtttatcgagcactgcgctctggcgccgctgccgggagaaggttcgttcgccggatcgattctttcccacgactttgtggaggcggcgctaatgcgtcgggcagggtggggcgtctggattgcctacgatctccccggctcctatgaagagctgccgccaaacctgctggatgagcttaaacgcgaccgccgctggtgtcacggcaacctgatgaactttcgtctgttcctggtgaaaggaatgcacccggtgcatcgcgccgtgttcctgacgggggtaatgtcatatctgtccgcgccgttatggtttatgttcctcgcgctttctaccgcgctgcaggtcgttcatgcgttaacagagccgcaatatttccttcagccgcgccagctttttccggtctggccgcagtggcgtccggaactggcaatcgcgctgtttgcatcaacgatggtgctgctgttcctgccgaagctgctcagtattatgctgatctggtgtaaaggcaccaaagagtatggcggtttctggcgcgttacgctgtcgctgttgctggaagtgctgttctccgtattgctggcgccggtgcgtatgctgtttcataccgtgtttgtggtcagcgcgtttctcggctgggaagtggtctggaactcaccgcaacgcgacgatgattctacgccgtggggagaagcctttatgcgtcacggctctcaactgctgctggggctggtctgggcggtgggtatggcgtggctggatttacgctttctgttctggctggcgccgattgtcttttcgctgattctgtcgccatttgtttcggtgatctccagtcgttcaacggtaggattacgcaccaaacgctggaagctgttcctgatcccggaagagtattcgccgcctcaggtgttggtcgataccgataaatatctggagatgaatcgccgccgtattctggacgatggctttatgcatgcggtatttaacccgtcgcttaatgcgctggcgaccgcgatggccactgcgcgtcaccgcgccagtaaggtactggaaatagcccgcgatcgtcatgtggagcaggcgctaaacgaaacgccggagaaactgaaccgcgatcggcgtctggttttgctcagcgatccggtgacgatggcgcgtttacactatcgggtctggaatgcgccagagagatactcttcctgggtaaaccattatcagtctctcgtcctgaatccgcaggcgttgcagggacgaacatcgtcagcgagataaggtcttcaggtctggagtgaggtgaaaaataccggcgtgatgccggtatttttatagtgaaatgaggtatcaggtgcgtatattcgcggtgagcataatggtgattaccctgagcggctgcggcagtattatcagcagaacgatccccggacaaggacacggcaaccagtattaccctggcgtgcagtgggatatgcgtgattccgcatggcgctatatcactatcctcgatctgcccttctcactgatcttcgatacactgctactgccgctcgatattcaccacgggccttatgagtaattaacgctcatcccattcgtctgccgcagtacggccttcctcggtatcaagcgggggttcaagctggaattccccttcatcccattcatgcaaagtattctcttcctgccactcctggcggatctctatctcatcataatcgccgtcaaacacgctctgcgcggcttcaccactcagcatcggcagacattcgccatcttcaccttcatcggcgaaaaattcgacctgccacatgatgtccccatcctgcagtacatatttctgaacgttgaactgctgcacattcgcttcgtcttgttcgaggcctggatggtcagccagaaattcttcccgggctgcatcgatagcttcttccagcgtggcatacatggtcatcagtgtctccctttgatttgatgaggtatttagggaaagaatagctgattctgtaatattgcaagtatgaaagcgcaaaaattattctattgccagtctgcgccgtcgtaagctgttccatgaatagatagcattgaacaacaccacgcctgccgtgacgcagaatacggcgcggaagccatagctcgcggaaattgcggcgcccatgagagggccggtgacgttgccgatatcgcggaaagattggttgtaactgaatatgcgcccggctatctggttggtagagttgtaaaccagcagagtttgaacggctggcagcagcgcgccatccgccgcgccaagcagaaaccgcaatagcgcgagctgccacggcgtttgcacaaaagacattggaatcagcagcagtacggaaataatcagcgcgacgataagaatcttttccgggccaattctgtcgccaagcttgccgagccggggggcgctaagtaatgccgccacgccgggaacggacgctatcatcccgctaatgaacgcaatattactgacatctcccgccagttcgcgcacatagagcgtcaggatgggcgcaatagaccccgtcgccacctgaataatcagcgtggtgacaaacaggcttaataccaggcggggattttttaacgaggcgaccacttcccgaacgtgaagcatctcttttttgctcaccggcaggaaattctcgcgaatgaaaaagaaggtgagcagaaaacagataaacaaaacgctggcggtaataaaaaagaccggacgaaggccgtaatggtcggcgagcagaccgcccgcaagtgggccaagcagagcgccgctgacgccgccagtagagagcgtccctaacgcccagccgcttttgtggcgcggcacctgagtggcgatgagcgcattggcgttgggaataaatccgcccagcaggcctaataacgcgcggaggatcagaaattgccagatattttgcgccatgcccattaacagcatcacaatggccatgccgagagcggaacgcaacagcatgatcttacgccctttacgatccgccagaccgccccaaaaaggggacgcgatagctgaaaagaggaacgtaatactaaagaccagcccggaccacatgttgagcgcgctatggcctgttacgccgagttgctcaacgtagagagggagaaaaggcatgaccaggctgaatgccgcgccggttaaaaaacagcccagccaggtaacggttagattgcgtttccagtttatggggacatcagagggtgacatagcgttccacagtatgatgcgcggtttgcgctatcatcaatttaattatgagcgtactaattataattatgcgccgaccttaccagcctcgcaatgtggggagcttttaaagctaaaagaggggaaaaattgcagcctgacggctgcaatcctgtcaatagcgcgacggtacgccttcagggcgagttttaaagcggcgatgcagccacatatactgctctggcgccatcataatgcactgctcaacaatcttattcatccatgcggcagtcgcttctgcgctctccagcggaggcgaatattccgcaggaagaatgatcagttcgtagcctttcccatcgggtttacggcgaggcacgaaggggataatacaggctttagacatgcgcgcgagcatccaggtaccggaggtcgtggcagcctggtcgacagcgaataatggtacaaaaacgctggcgcgcgggccataatcgtgatccggcgcataccagatcaattcgccgcttttcaatgccttaaccatgcctttcagatctttgcgatccaacattgatttattggagcgtaagcgtccccaggtctgtaaccagtcgagcaacggattatcattcgggcgataaactccgatacccgggttatgcataccaaacatgcgggcgccaaactcaagggtaaggaaatgtattcctaccagaatgaaccccagtccctgcgccttaacttcacggatatgctccagaccgctcgcttccatccagcggttcactcgccgatcgggccagaaccaggccatgccggtttccatcacgcccataccgacggattcaaagtttttgaccaccatggtgtggcgttcctgcgcgctcatttccggaaagcataattcaaggttgcgataggcgatttttgcgcggcgtttcattacgcgtcgcgccaggtggcccaatgcgcaacccaatttatagatgaccgggtaggggagttgcacgaccaaccaaagcgcgcctatacccaaccaggttaaccaatagcgcgggtgcagtaaggccacggagaacttaggcaacttcgtcatttctatcctgtctttcaacgaacaattccccgtattctcgcatctttttgcgttgagcaaaaatatgtagcaggagagtggcgattaaatcgacaattgttgttaattatttagtgtaaagcaggaaatgtagcgcaaaatgtgtggatgtaaattggcgagacttgccttatcatgcctgcccactttattttttgctgattgcaggatacgtacaccatgccagtgttacacaaccgcatctctaatgacgagctgaaagccaaaatgctggcggaaagcgagccgcgtacgacaatttctttttataaatatttcactatcgcctctccgcaacagacgcgggacgcgttgtatcaggtgtttacggcgttggacgtttttggtcgcgtttacctggcgcatgaaggcatcaatgcgcaaatcagcgtgccgcaaagcaagctcgagacgtttcgtcaacagctttatacgttcgaccccgcgctggacggggtgcgtttaaatatcgcgctggaggatgacggaaagtcattttgggtgctgcgtatgaaagttcgcgaccgtatcgttgctgacggtattgacgatccgacttttgacgccagtaatgtcggcgattatctgaaggcggcagatgtgaatgcgatgctggacgatcctgacgcggtctttattgatatgcgcaaccactatgagtatgaagtcggccatttcgaaaatgctctggaaatcccggcggatacgtttcgtgaacagttgccaaaagcggttgaaatgctgcgggaacatgcagataaaaagatagtgatgtactgtaccggcggtattcgttgtgagaaagccagcgcctggatgaaacacaacggtttcaataaagtctggcatattgagggtggcatcattgagtacgcccgtcgcgcgcgcgcgcaggggcttcccgttcgctttatcggcaaaaactttgtatttgatgagcgaatgggcgaacgaatctcggatgaggttatcgcgcattgccatcagtgcggcgcgtcctgcgatagccataccaactgcaaaaatgacggttgccatctgctgtttatccagtgtccgcagtgcgccagtaaatttaacggctgctgtagtgaacaatgctgtgaagagttggccttgccggaggaagaacagcgccgacgtcgcgcgggtcgcgagaacggcaacaaaatttttaataaatcgcgtggtcggcttaatagcaaactgagcattcccgatccggctgagtaatattttgccggatagcggcgtaaaggccgctatccggcatttcgccaggcgttacttctgctgaacgccttctactgagatgataagctcaacctcttgtgaggccgggccgagatcggtagttatattgaaatccttcagcttaatttttccttcggcctcaaagcccgcgcgcttaccgccccacggatcgtcgccctggcccatcagcttcgcttccagcgtcaccggtttagtcacgccattgagcgtcagattgccggtaatatccagttcatcgccctcttttttcacgctggtagaggtgaaggttgcctgcgggaatttcgcaacattaagaaattccgcgctacgcaggtgtttgtcacgttcggcatggttagtgtcgacgctattggtgttaatggtcacgttcactttgtctgccgacggatttttttcgtcaaaagtgaacgtgccgtcgaaatctttaaaggtgccgtatagccagctgtagcccagatgctgaatgcggaaattgacgaacgcatgttggccttctttatcaattttatactccgccgccacggcggaaccggtcgtgaataacaaggatgcgagggtgaatcccagcaggttttttttcatttttgagctccatagtcagatgacgacattcctgtcatacgtttcagagtgtcgtctttatcgatgaaatggtgttttagcgccataaccccatgcgagagcgagataatgaccagcgaccaggcaaaccacagatgcagtgttccggcgatgtcagcctgcgcgcccgcgtccgtaagcgtggccggaatctcaaaccagccaaagacgctaatcggtttaccgtcggcggtggaaatcaggtagccgctaatgattatcgcaaagagcaggagataaaggaggagatgacctgcggcggcgccaatgcgcgttaaacgggaatagctggtcaacgcaacgggcggcggcgaataaagccgccagataatacgcacgatcagcgccatcatcagtaatatgccaatacttttatgtatttccggcgcctggtgataccagccgtcgtaataactgagcgtgaccatccataagcccaacgcaaacatgccatagaccaccagggcggtcagccagtggagcgcggcggaaaccacgccataacgctgtggagtatttttaaattgcataaacacaccaatgaatatttcacgagagaatgaaaatggcgtggaaaagcgccgaatgcaacttataaataagaatttgaatgatatttatttttatttcaataattttgatgttgtttgcggttcagcttcagaagtttcgagatatttccccctgataaccgcgcaacggcaagaactggcattattgccgtgcttcaacgttatgaaataaaaagtgaggaattttcaggaagtgtcagttaacgtcaatgaaaagcaatcagaagaaaaggagataaacaatatccatcaccgccagcagcgaccaaagaataacgtaaagcatgaaatgttcgcgaatattattcatcagaaaatgaaagagacgacgcatagcttaccttaataaacagcccctttacggggccgacaaattattggctaaaacgggaaagccggaacggcgtcagatcaaaggagggcgtttttcccaacgcaaaatccgcagcgatttctcctaacaccggggcgaatttaaaaccatgtccgctgagtccagtgatgacaagcgtgttctcatggccaggcagcgtatcgataataaaatcctcgtccggcgaattatcataggtacatgccgccccatgtaaacaaccgccgatacccggcagtacgttacgcaggaaaggaaatgcttccgcgccatcgctggcaacggcggcaaagggcttgcgctcttccggagcttgtattagctgtccgccattgtgtttgccgatttttaactcgtcgttctccgccgggaagccgtaatattgatcgccgttgggcatttcgccggtaaaggccggaaagcggtttttagtgctgtaacgcccatccgccttaaaccaggcaaaaactttacgtacgggctgaacgggcagctccggtaccagcgctttgacccaggtgcccgcgctaatcagcgccttgctggcgtggtagcagccttcactcgtctctatcgtcacaccgttatcatcatggtgaatatggcttaccgggctgttaaatagctgtgcgcagcctgcctctcgggccagacgaagccatgtggtaatggctaattcgctgcgcaggaaaccggagtcagcttcaaacagcccgatataattatcgggcacgcgaatttccggccagcgcgtcatgagggccgtcgcgtccaggcgctcgacgttcaattgccactgttgcgcgcttcgtgcgacgttggctaagaaagcggaatcggccgggccgaggttgacgacgccggagcggacaaaaataggctcttcattgtgtgtggagagttcatcccaaagcgtctgggcgcgaagcaccagcgggacatatttttcgccttcaccataagcgtggcggataagacgggtatcgccgtggtggctgccctgttgatgaggcggcatatgcgcatcggtcatcaggacctttagcccggcgcgggtggcgtaataaccagcggcggcgccaaccgaaccgctgccgataataataaggtcgtatttcatcagcttctctctgctatcgcgatgatttcagggtaaataactgcgctgagatatacaagccagaaataagtgaggcaccttacggtgcctgagagagggggagcgcgtcacgctaatggcgacgatactcgttttcctggtaatcgcctgattctattttggcgatgccggcttctaatattgaaataaattgcctggctacatctgttgttaaccagagcgtttgaccaacttcagtcccttccggttccggacgatttggggtctggtagtgtaaacgcagcatcagcgcatcatagctatcgacggtgctgatgtcccatcctacaagcggatgggtctgaatgacttcattattcttttccatcatgcccccctggtacgtgttataagacaacggttctcgaggttcaatgcgtgtttttcttctgaagcaacttcagtataccaattaataaggctattcactgcgtttttaaagagaccggaggataaatttctctttttaagaattatatgaacaataaagcggcagttcattcatatttttttaggatgttgtgcaattattttgagggtcaggtgaaatattcatcagttgcgcaaataaaaaagccggggcgacccggcaaacatacatcactgcatatcattttttattcattgatgaaccagtcatcagcgctctcccaggtctcctggagaatctcgctaatgcgttctttgtcctcttttgatgcgccaatgacggacaagttgttggcggtagcgtaacgcacggtgacgttacccaaattctccggaaaatgatggctaatacggcgggagagttcgcccgccagcgcatcaatcgcaccggcaggcagaggtgacgttttggctatagtgacttcaatacgcataatggccccctgttgaatatactggatatatatacagttaaatccagtatatagcaacaggtaagcgcattttttatttttttactgaccagcgtactgtttcacccgctaaaaaaggcaccagagaatcatcagccagcgcgatatttcccggtatctgttgttcatcgcgaaccagttccacccaccccgtattcatcggcaggccatagaattgcgggccattcagtgaacagaacgcttcaaagtgcgccagcgcgttcatttcctcaaacacggcggcataactgccaagggcggagggggcgttgaaacaaccggcgcagccgcaactggtctctttacgatgacgtgaatgcggcgctgaatccgtccccaggaaggcgcgcgtaaaaccactggcaaccagttcgcgtaacgcctgctggtgaatattgcgtttcagaatcggcagacagtacaggtgaggacgaatgccgccgaccagcatatcattacggttaaacattaaatgttgaggcgtaatggtagccgccaggtagtcgttgccgtcacgtacatactgcgcggcatctttggtcgtgatgtgctcaaagaccactttaagcgcggtcagacgctggcgtagcggttccattacggtgtcgataaaacgcgcttcacgatcgaatatatcaacatccgcatgggtcacctccccgtggaccagcaatggtattccgagtttttccatccgctccagtaccggcatgatagcgtcgactgacgttacgccatgactggagttagtggtggcattggccgggtaaagcttagccgcagtaaatacgccttcatggaaaccacgctccagttcatcggcatcgagcgaatccgttaaatagcaggtcattaacggcgtgaaatcatgcccggcgggcaccgcatcgagaatacgctggcggtaggcgatcgctgcatcaacggtcgtgatgggggacgccaggttcggcatcacgatagcgcgaccataaatttcgctggtatagggtacgaccgtttttaacatgtcgccatcgcgaaggtgaacgtgccagtcgtccgggcggcggatctttaaaacctgggatggtgcagtcattaataagctccggctgaggaatagtctttttgccggaaacaaaggataagcggaaacgttttcgtttgcacgtaaaaaaaagggcgcgagcgcgccctccgaaatcaattggtgaaaggaataacgatttcaccaggtttaacttcaatgcctttcgcgagtttctttgctaacgcttcgcctttactgctgtcctcacgcaacacgtaagcgggccgctggttaaagtagctacgtaaagactgatttaaataaggcaggagcgtttgtagcaccgattgcattttctccggcgtcacggtggcgtctactacttccatctcctgaagatagatggcgcctttttctttatcaaagaccggcagggcttttagcttgagtttcatcgtcgctttttgactgccaaacagggaattcatatccagcctggcatcgccagtaagggtgactttattaggttcttcccgaccaatctggctgacaaggttagtcaatacgatatgcgcgtcggcaatgccgggcagaccaatatcttttgagaaattattccgtttttcaagcgcttgattgatttcttgttcgctaatggtgtattgcgtaagttgattacaacccactaacaggccgctaactaccagcgcagcggcaaaaaaaaactttttcatggcgttccttagcatgttgcctgtgccctaatcttgacacaaagcagcatgtcgcgccagcggacatggtgccactagaaaaagctgaaaaaggcggcaagaaagggttgccgcctggcgggagttagatagccattgaggagagtaaattaatttgcgtctgctttgccatattatcgcgatagtccgcgacttttgtcggccagtggataccggcgaccagcgtcagattacgcagaagcggaaacagatgaatatcatcttccgataattcgccgttaacggcgttaggctgtacgatgagtttatccagcaaacgtaaatcatcgccgatctttttaatcagtcctgcagagtgcgcaagatggttgtcaaaactgccagatgaggcttcttttttgcggataaaatactgacgcgccgcaggggtagaaaattcatcgaaagcggattttgcaaatcgcggcagcagtagctgattaacgtaaccgttaactttgcgcaaccactcttcaatggctggattgcgtttcccggttaacagcggtttgccgtcgaggttgtcgacataatgtacaatatccatactttcaggaaggtagcgactatcatctttttgcaggatgggcaccatcttttgaccaatcatccgggtgggcgtcgcctcgtcgtcattttgtaacacgttaagttcaacggggatgttcttcaggccgaaaatcatgcgggctttaacgcagaaagggcaatgatcgtaaatataaagcttcacgtttctcctccatttgactgtcggtatctgaccagtatggaggagatagcgacaggtatcaaatcaggcgccgggttccagcatccggcgcggcgtgcgtttatgactaaattgccagcctaaagccaaaaaggtgataaagccgataataccgagcatcatccacggtagttcaggctgcgcaagcgctttccccatatcaaacaaccagccgccgccgatataaccaatcgcgccgccaatggctaatcccagacggctaaagcccatatagcttccccgcgccctcgcgtctgcgagcgacgcgctgagcgtttcgcgcgccggttcggcgataaccgagccgatgtagaaagcgcaaataagcgtaaaaagctgctgtaaattgcccaccatcccgatggggagcatgctcagcgacatgacgagcaaaccggccatcagccgatgctccagccgaaaacgcttttcgctccagcgggcaatcgggtagagcaacgtcagcgagagacacgcctcaatagcgtacatccatttcacggcagcaggcgaaccggcgatatcgtttaccataatcggcagcattaacatgacctgtaccgccagcatatagtagcccgccagcgtcagcacgtaggttacaaaccttttatcgctcatgacgcggcgcattccttcacgcaccggcgttctgaccgttgatagcttccaggccggaagcagccatgcgttgaaaagggcgcataatatgaacaaaatagcgcccgtcgcgcagaccaggcgaaaatcgtattgtagcaaccagcttcccagcagcgcgccaatcaccgcacccgcgctgtcctgcatcatcaacagagagaagaagcggtcccgttgctccggacgaattaatttgaccaccagcgctgaacgcggcgggtcgaaaagcgtaccgccgagaccggaaagaaagcaggaaaaccacaagagccagggctcatgcgcgatacccatggtggcaaagcctgcggcgcgcatcagcataccggtgacaatcatcggtttcgcgccaaagcgatcggcgatggcgccgccaaaaatgcccagaccttgttgaataaactggcgcaggccgagcgcgatccctaccattacggcagcccaccccatttgatcgacaaagcgaatagagatgagcgggaagacgacgaaaaaacccagcaccaccaacatgttatcgatgagaagaaaatatttacccaggttcctcgcctgcgagacgcgcgacatttcccctcccgggaaataaaagatgagcgtcttctattctgcggcggcgtttcgttttttcctaccgttagcgggacaatatttttttatcaaaagtcctttttaatcgagagttttcatcaaaatgtggcagcaattcaaaaaatgacgatttgcgcttttcacagagcctggttgcgcaagtatagtaatgttactggcgtgctgaagacgttacaggaaggagtaggtatagaatgtttggctatcgtagtaacgtgccaaaagtgcgcttaaccaccgatcgtctggtggtacgtttagtgcatgagcgtgatgcctggcgtctggccgattattacgcggaaaatcgtcattttttaaaaccctgggaaccggtccgtgatgaaagtcattgttatccttcaggatggcaggcgcgtctgggaatgatcggtgaatttcacaaacagggctccgccttctatttcgcgctacttgatccggaagaaaaagaaattatcggcgtggcgaatttttccaatgtggtgcgcggttcttttcatgcctgttatctgggctattccattgcgcagaagtggcaggggcaagggctgatgtttgaagccttaaccgctgcgattcgctatatgcagcgcactcagcatatccaccgtatcatggcgaactatatgccgcacaacaaacgtagcggcgcgttgctggcgcggcttggctttgaaaaagaaggctatgcgaaagattacctgttgattgatggacaatggcgcgaccatgtcctgacggcgttaaccacgccgttatggacgccggggcgttgagcggcttacggaatgagaggcaaagggagaaaacgatgaaatatgaattaaccgccactgaagcgcgagtgattggctgtctgctggaaaagcaggtgacaacgccggaacagtatccgctttccgtcaacggcgtggtgacagcctgtaatcagaaaaccaaccgtgaaccggtgatgaacctgacggaacaagaggtacaagaacagctcgataacctggtgaaacgccactttttgcgtacggtcagcgggtttggcaaccgcgtcaccaaatatgaacagcgtttctgtaattccgaatttggcgatctgaaacttagcgcggcggaagtggcgctcgtcactacgctgctgctgcgtggcgcgcaaacgcccggcgagttgcgtagccgggcgtcgcggatgcatgaattcagcgatatggcggaagttgaatccacgctggaacggcttgccagtcgtgaggacggcccgtatgtcgtccgtctggcgcgtgaaccgggtaagcgcgaaagccgctatatgcaccttttttgcggcgacgtcgatgaactgtctctccagacgtctgcgccggaaagtgcgtcgggcgatcttcagtcgcgcgtcgaagcgctggaaagcgaagtggcggagttaaagcagcggctggattctttgttagctcacctgggagagtaatgtgagaacattacggattggcattgtcgggttaggcggtattgcgcagaaggcctggctgccggtattaaccaacaccgccggatggacgttacagggcgcctggtctccttcgcgggataaagccttacgtatttgcgaaagctggcgcataccgtatgtggattcgctggcgaatttagcgtccagctgcgatgcggtctttgtccactccagtaccgcaagccattatgccgtggtcagcgaacttctcaatgccggcgtccatgtctgcgtggataaaccgctggcggaaaatctacgtgatgccgaacggctggtggcgctggcggcgcaaaaaaaattgacgctgatggttggctttaatcgccgtttcgcgccgctgtaccgcgaactgaagacgcgcctcggcactgcggcgtcactacgtatggataaacatcgtaccgatagcgtcgggccgcacgacttacgttttactttgctcgatgactatctgcatgtcgtggataccgctctgtggctggcgggcggcgaggcgcgccttgccagcggcacgttgctcaccagcgagtccggcgaaatgtgctatgcggaacatcatttttccgccgacaaactacaaattaccaccagtatgcaccggcgcgccggaagtcagcgtgaatcggtccaggccgtcaccgacggcgggctatatgacgtgacggatatgcgtgaatggcgcgaagagcgcgggcagggtattctcatcaaacccattcctagttggcaaacgacgcttgaacagcgtggttttgtcggatgcgcgcggcatttcattgactgcgtacaaaatcagacggttccggaaacggcgggggagcaggcgattttggcccagcgcgtcgtggaggcgctgtggcgggacgccatcagcgaataaccctctgtaacatctggcggtagtaattcatcgtaatccaggtactataccctcaataattcgagttgcagaaaagctaacgcacatgcagctcgaagtatggcgggtatatatgcccactctacacaatacctcttttcacagtgaataatggcaaaccgtggggagtctgtaaggcctgataagacgttttaacgtcgccgtcaggcgcggtgatacagccggatacggcagaagttgcgttatccggtcgatggatcagccatgcaggagttttacgccagggtctggaatacaaaagaaatgaatttattgaaatcgctggctgccgtcagctcgatgactatgttttcacgcgtgttgggctttgcccgtgatgcgattgtcgccagaatttttggcgcagggatggcgaccgacgccttttttgtggcgtttaaactccctaatttactacgccggatctttgccgaaggcgctttttctcaggcctttgtgcctatcctggcggaatataagagcaagcagggtgaagaagcgacgcggatctttgtcgcttacgtttccggcctgttgacgctggcattggccgtcgtgacggtggccggtatgctggccgccccgtgggtgattatggtaaccgcgccgggttttgccgatactgcggataaattcgcgctgacgacgcaactgctgcggattacatttccctatattctgctgatctcgctggcttcactggttggcgccattctcaacacctggaatcgcttctctattcccgcttttgcgccgacatttcttaatatcagcatgatcggttttgcattattcgccgcgccatactttaatccgccggtgctggcgttagcctgggcagtcaccgttggcggcgtgctgcaactggtgtatcaacttccgtatttgaaaaagatcggtatgctggtgctgccgcgcattaactttcgcgacaccggggcgatgcgggtggtcaaacagatggggccggcgattttgggcgtttccgtcagtcagatctcccttatcatcaataccattttcgcctcgtttctggcctccggctcggtctcatggatgtactatgccgatcggttgatggagttcccgtccggcgtgctgggcgtggcgttggggaccatcttgttgccgtcattgtcgaaaagctttgccagcggcaatcatgatgagtactgccgcctgatggactgggggctgcgtttgtgctttttactggcgttgccgagcgcggtagcgttaggcattctggcgaagccgctgacggtctcgctgtttcagtacggtaaattcaccgcctttgatgcggcgatgacgcagcgggcgttaatcgcctattcggtggggctgattggcttgatcgtcgtaaaagtgctggctccgggcttctattctcgccaggatattaaaacgccggtgaaaatcgccatagtgacgttaatcatgacgcagttaatgaacctggcgtttattggaccgctgaaacacgccgggctgtcgctctctattggtttggcggcatgtctcaatgcgtcgctgctgtactggcaactgcgcaaacagaatatctttacgccacaaccgggctggatgtggttcctgatgcgtctgatcatttccgtactggtgatggccgccgtattgttcggcgtgttgcatattatgccggagtggtcgcaagggtcgatgctatggcgtttgctgcgtttgatggcggtagtgatcgcgggtatcgcggcctatttcgccgcgcttgccgtgctgggctttaaagtgaaagagtttgttcgccggacggcgtaaattcagtgcctgatagcgctgtgctatcaggcctacaaggcattcaggccggaaaggcgcaacgtcgccatccggcaatgattagatagaaatttttttaccgccgcggtgagagacggaagtctgaccgtcagccccgtacaaggtcggctcctggtgaggtttcagcacctccagcgcctgttgattacgctcgatttgcccttccagcagccagccgttgtgctggttgaggtcgcgaagatgctgcgttttttcggtaatcgcctgccagcgctctgcaatgtcatcgtttgcgctacgctgcgcattctgctccagacggcgctgttgttccagataatccagcgtcgccagcaacgagcttttttcttctgtaatacgctgtagctggctgccgttaatctggcctacggaaagctgttgttgctcggcgtccatcaccgtcttcaggtcattcaggacggtggtcatctggtcaagtatttctgacaaacgagtcatacgcttatttactctgtaagtagctctgcgcctcgcgaatgagcgagtctgctatttttcccgtatccatttttaactcaccgttacggatagccgtttttaatgcttcgacgcgttccatattaatgtcgctgacgcctggctgcatgagcttcgcttgcgcgtcgcttaacgttacgctggcgctcgtcgcggcggacgttttttcctgacgcgttttttgtaccggcgtgtcgctggtttcgcgcgtctggacagtgctaacgggtttcaaaggtgaggtacggtcaatgctcatttatttatcctcatcgagggttacgttgtagcggccagctaccatcatggttgaatatctcatcggcagccgcgacaaaatctttacacaattataggttaataagaatattcccatcagaatcgacggttccactcacgatttgacccgatgtcatgcgcacgcgcgcattttgcgcgacggcagcattattcatcgcctgaccttccgcattgacgctgaacccctcgccattggcgatgacctgtactcgttgccccgctttgacgcgccaggcctgacgtatcatcgtaagctgtaccggctgcccgggagcgagatcgcgcaaactgacggcatcctgaatctgacggatatccagtaccgtccgcggcggtaactgatccagcctgccacgttttagcgtgacgttggccggcgtcaattttccgccgcgcgcgatgggcgcggcaacggcgacataattgccggtcgcttgcacattcacctgcaaataacgtttttcattggcgcagcgcgccaccacattgacgttgccccacagcttcgcgctgcccgtcatgctgaaggctggctgttcgcagctcggtagcagattgggcgatgaacggagcgtgacaaccacctcgtcgctgaagccagccagacgctgggaaaaccacgtggtcagctgggcgttgatgtcctgcgccattgtcagggggctgaacagcaaagccgccacggcgaatcctcgttttaacgtttgcatggtacttccccctggttgatgtcatgacaggattctacccgtgtgaagcaagcatcaacgcaataaatagcgacgcattttgcgtttattccggcgataacgcgcgcgtgaaggcatttaagctgtcggctgaattttgccatttgcggaggagatatgctcgacaggctcgatgccgccttacgatttcagcaggaagcgctaaatctgcgcgcgcaacgtcaggaaatattagcggcgaatatcgccaatgccgatacgccggggtatcaggcgcgcgatattgattttgccagtgagttaaaaaaggtgatggtgcgtggacgggaagaaaccggcggcgtcgcgttaacgttgacttcctctcaccatattcccgcccaggcggtctcttctcccgcagtggatctgctttatcgcgtacccgatcagccttctttggatggtaataccgtagatatggacagggaacgtacgcagtttgcggataacagtctcaaatatcagatggggcttaccgttctgggtagccaactcaaaggcatgatgaatgtgctacagggaggaaactaattcgtggcgctgttaaacatttttgatattgccggatcggcgcttgccgcacagtccaaacggttgaacgttgcggccagtaacctggcgaatgcggatagcgtcaccggcccggacggacagccttatcgcgccaaacaggtggtttttcaggtggacgccgcgccgggtcaagccactggcggggtaaaggtcgccagcgtgattgaaagtcaggcaccggaaaagctggtttatgagccaggcaatccgctggcggacgctaatggttacgtcaaaatgcccaacgtcgatgtggtcggcgaaatggtcaacacgatgtcagcctcgcgcagctatcaggcaaatatcgaagtcctgaataccgtaaaaagcatgatgcttaaaacgctgacattaggccagtaaaggaggcgcgtatgtctattgccgtaaatatgaatgacccgaccaacacgggcgtcaaaacgacgaccggcagcggatcgatgaccggaagcaacgctgccgatctgcaaagcagtttcctgaccttactggtcgcgcaattgaagaaccaggacccgactaacccattacaaaataatgagttaacgacacagttggcgcaaatcagtaccgtgagcggcattgaaaaactgaatacgacgctgggggctatttccgggcaaatcgataatagtcagtccctacaggcgaccacgctgattggacatggcgttatggtgcctggcaccacaattctggcgggtaaaggcgcggaagaaggggccgtgacgtccacgacgccgtttggcgtggaattgcaacagcctgcggacaaagtgacggcaaccattaccgataaagatggccgggtggtacggacgctggagatcggtgagttgcgagccggggtacacacctttacctgggatggtaagcaaacggacggaacaacggtaccgaatggttcttacaacattgcgattaccgccagcaatggcgggacgcaactggtggcgcagccgctgcaattcgctctggtacagggcgtgacgaagggcagtaacggcaacctgttggatctgggtacctacggcaccaccacactcgacgaagttcggcaaataatctaagcccttacacttatcaggagtcagtcatgtctttttctcaagcggttagcggcctgaacgctgcggccaccaaccttgatgttatcggtaataacatcgccaactccgccacctatggctttaagtccggtacggcatcatttgccgatatgttcgccggttccaaagtggggctgggcgtaaaagtggcggggattacccaggattttaccgacggtacgacaacgaacaccgggcgcgggctggatgtcgcgattagccagaacggttttttccgcctggtagacagcaacggttccgtgttctatagccgcaacggccagttcaaactggacgagaaccgtaacctggtcaatatgcaggggatgcagttgaccggctatccggccaccggtacgccgccgaccattcagcagggggcgaatcctgcgccgatcaccattccgaacacgctgatggcggcgaaatcgaccaccaccgcgtcaatgcagatcaacctgaactcaacggaccctgtaccgtctaaaacgccctttagcgtgagtgatgcggattcgtataacaaaaaaggcaccgtcaccgtttatgacagccagggtaatgcccatgacatgaacgtctattttgtgaaaaccaaagataatgaatgggccgtgtacacccatgacagcagcgatcctgcagccactgcgccaacaacggcgtccactacgctgaaattcaatgaaaacgggattctggagtctggcggtacggtgaacatcaccaccggtacgattaatggcgcgacagcggccaccttctccctcagcttccttaactccatgcagcagaacaccggggctaataacatcgtcgccaccaatcaaaacggctataagccgggcgacctggtgagctaccagattaacaacgacggcaccgtggttggcaactactccaacgagcaggagcaggtgctggggcagattgtgctggctaacttcgccaacaacgaaggtctggcatcccagggcgataacgtctgggcggcgacgcaggcttccggggttgcgctgctggggactgccggttccggcaacttcggtaagctgacgaacggcgcgctggaagcctctaacgtggatttgagtaaagagctggtgaatatgatcgtcgcgcagcgtaactaccagtcgaatgcgcagaccatcaaaacccaggaccagatcctcaatacgctggttaacctgcgctaagcgcctgacgggatagcttaatggatcacgcaatttataccgccatgggggcggccagccagacgcttaaccagcaggcggtaacggccagcaacctggctaatgcctcaacgccgggctttcgcgcgcagcttaacgcgctacgcgcggtgcccgttgatggcctctctttagcaacgcgcacgctggttacggcgtcgacgccgggggcggatatgaccccgggtcagttggactacacctcccgtccgctggatgtcgcgttacagcaggacggctggctggtagtgcaagcggcggatggcgctgaaggatatacccgtaacgggaatatccaggtgggtccgaccgggcagttaaccattcagggacatccggttatcggcgaaggcggcccgattaccgttcctgaagggtcggaaatcaccattgcggcagacggcacgatctccgcgctcaatcccggcgacccgccaaacacggtggcgcccgttgggcgactgaagctggtcaaagcggaaggcaatgaggtgcagcggagcgatgacggtttattccgccttaccgccgaggcacaggctgaacgcggggcggtactggccgccgacccgtcaattcgcattatgtcgggcgtgctggagggcagtaacgtcaagccggttgaagccatgaccgacatgatcgccaacgcacgtcgttttgaaatgcagatgaaggttatcaccagcgtagatgagaacgaagggcgagctaaccaactgctgtcgatgagttaatacaggacattttatgatcagttcattatggatcgccaaaaccggtctggacgcgcagcaaaccaatatggatgtgattgccaataacctggcaaacgtcagcaccaatggttttaagcgtcagcgcgcggtatttgaagatctgttgtatcagaccatccgccagccgggcgcgcagtcgtccgagcagacgacgctgccttcagggctgcaaatcggtaccggcgtgcgtccggtcgccacggagcgtctgcacagtcaggggaacctgtcgcagaccaacaacagtaaagatgtggcgattaaagggcagggctttttccaggtcatgctgccggacggtacgtctgcttatacccgcgacggctctttccaggtggatcagaatggtcaactggtgacggcgggcggttttcaggtgcagccggcaatcaccattccggccaacgcgttaagcatcacgattggccgcgacggcgtggtcagcgttacccagcaggggcaggccgcgccggttcaggtcgggcagcttaacctgaccacctttatgaacgacaccgggctggaaagcattggcgagaacctctatatcgaaacgcaatcgtccggcgcgccgaacgaaagcacgccggggctcaacggcgcggggttgttgtatcaagggtatgtcgaaacgtcgaacgttaacgtggcggaagagctggtgaacatgattcaggttcaacgcgcctatgaaattaacagtaaagcagtatcgacgaccgatcagatgctgcagaaactgacgcaactctaaggggccgccggtgggggatacgccaccggctccctgattttgaagatgaaggtaatgcaaaaatacgcgcttcacgcttacccagttatggccctgatggtcgcgacgctgacaggatgcgcctggatacccgctaaaccgcttgtgcagggggcgaccacggcgcagccgatacctggcccggtaccggtggcgaatggctccatatttcagtctgcgcagccgattaattatggctatcagccgctttttgaagatcgtcgaccgcgtaatatcggcgatacgctcacgattgtgttacaggaaaacgtcagcgccagtaaaagctcgtcggcaaatgccagccgcgacggcaaaaccagttttggttttgatacggtaccgcgttatctgcagggattattcggtaattcccgcgcggatatggaggcctccggcggcaactcttttaacggcaaaggcggcgcgaatgccagcaatacctttagcggcacgctgaccgtgaccgtcgatcaggttctggccaatggcaatttacacgtcgtgggggaaaaacagatcgcgattaatcagggaacggaattcatccgcttctccggcgtggtaaatccacgcaccatcagcggcagcaactctgttccctcgacacaggtggcggatgcgcggattgaatatgtcgggaacggctatattaacgaagcgcaaaatatgggctggctgcaacgtttcttccttaatttgtcgccgatgtaagcgaggtgtatgtgtttaaagctcttgcaggaatcgttctggcactggttgccactctggcgcacgccgagcgtatccgggatctgaccagtgtccagggagtacgggaaaactcgctgatcggctacgggctggtggtcgggttggacggtacgggcgaccagacgacccagacgccatttaccactcagacgctgaataacatgctgtcacaactggggattacggtccccaccggcaccaatatgcagttgaaaaacgtggcggcggtgatggtgacggcgtcgtatccgccttttgcgcgacagggacaaacgatcgatgtcgttgtttcctcaatggggaacgctaaaagtctgcgtggcgggacgttattaatgacgccgttaaaaggggtggacagccaggtgtatgctttggcgcagggcaatattctggtcggtggcgcgggcgcttccgcaggcggcagtagcgtgcaggttaaccagcttaatggcgggcgcatcactaacggcgcgattatcgaacgcgagttgccgactcagttcggcgctggcaacaccattaatctgcaattgaacgacgaagattttacgatggcgcagcaaattaccgacgccatcaaccgcgcgcgcggttacggcagcgccactgcgcttgatgcgcgaacggtacaggtacgcgtgcccagcggcaacagctcgcaggtgcgttttctggcggacattcaaaatatggaagtcaacgtgacgccgcaggatgcaaaagtcgtgatcaactcgcgtaccggttcggtggtcatgaatcgggaagtcacgctggatagctgcgctgtggcgcagggcaatttgtcagtgacagtcaatcgccagctcaacgtcaaccagccgaatacgccatttggcggcgggcagaccgtggtgacgccacagactcagatagatttgcgtcagagcggcggatcgctacagagcgtgcgttccagcgccaatctgaacagcgtagtgcgtgcgctgaatgcgcttggcgcgacgccgatggatctgatgtcgattttgcagtccatgcagagcgcgggctgtctacgcgccaaactggaaatcatctgatgatcggagacggtaaattgctggccagcgcggcctgggatgcgcaatctctgaacgaactgaaagcgaaagcgggccaggacccggcggcgaatatccgtcctgtggcccgtcaggtggaagggatgtttgtgcagatgatgctgaaaagtatgcgcgaggctttacccaaagatggtttattcagcagcgatcagacgcgtctgtataccagcatgtatgaccagcagatcgcccagcagatgaccgccggtaagggattggggctggcggatatgatggttaaacagatgaccagcgggcagacgatgcctgcggatgacgcgccgcaagtaccgcttaaattctccctggagacggtaaacagctatcaaaatcaggcgctgacccaactggtgcgcaaagccataccgaaaacgccggacagcagcgatgcgccgctctccggcgacagtaaagactttctggcccggctttcgctccctgcgaggctggccagcgaacaaagcggggtgccgcatcatctgattctggcgcaggcggcactggagtccggctgggggcagcggcaaatcctgcgggagaatggcgaacccagctataacgtatttggcgtgaaagcgaccgccagttggaaagggccggtgacggagatcaccaccactgaatacgaaaatggcgaagcgaaaaaagtgaaagcgaaattccgcgtctatagctcgtatctggaggcattatcggattatgtcgcgctgttaacgcgtaacccacgctacgctgccgtgaccactgccgccacggcagagcagggcgcagtggctctgcaaaacgccggatacgccactgacccgaattacgcgcgtaaattgaccagcatgattcagcagttgaaagcgatgagtgaaaaggtcagcaaaacctacagcgcgaatctcgacaatctcttttaaattgctcaagtccacgtagtcgctgccgataacaacgagtattgaaggattaaaaggaaccatcatgtccagcttgattaatcacgccatgagcggacttaacgccgcgcaggccgcgttaaatacggtcagtaataacatcaacaattataacgttgcgggttatacccggcagacaactattctggcgcaggcaaacagtacgttaggggctggcggctggataggtaatggcgtttacgtttcaggcgtacagcgcgaatatgatgcgtttatcactaatcagctacgcggcgcgcaaaaccagagcagcggcttaaccacgcgctatgaacaaatgtcgaaaatcgacaacctgctggccgataaatccagctcactgtctggttcgttgcagagtttttttaccagcctgcaaacgttagtcagtaacgcggaagatcctgcggcgcgtcaggcgctgattggtaaagcggaagggctggtaaaccagttcaaaaccaccgatcagtatctgcgcgatcaggataaacaggtcaatatcgcgattggctccagcgtggcgcaaatcaacaattacgcgaagcagatagctaacctgaacgatcaaatctcccgtatgacgggcgtaggcgcgggcgcatcgccgaacgacctgctcgatcagcgtgatcagttggtcagcgagcttaacaagatcgttggcgtcgaggtgagtgtacaggacggcggcacctataacctgacgatggccaatggctatacgctggtgcaggggtcgacggcgcgtcagttggcggcggttccctccagcgccgacccgacgcgaacgactgtcgcttatgtcgatgaggccgccggtaacatcgaaattccggaaaagttgctgaacaccggttcgctcggcgggctactgacgttccgttctcaggatctggatcagactcgtaatacgctgggccagttggcgttggcgtttgccgatgcgtttaacgcgcagcataccaaaggttatgacgccgacggcaataaagggaaagacttctttagcattggctcgccggtggtatatagcaacagtaataatgccgataaaacggtatcgctaaccgctaaggtggtcgacagcacgaaggttcaggcgacggattataagattgtttttgacggtacagactggcaggttactcgcactgcggataacaccaccttcacggcgacaaaagatgctgacggaaaactggagattgacggtctgaaagtgacggtagggaccggcgcacagaaaaatgacagttttcttctcaagccggtcagcaatgctatcgtcgacatgaacgttaaagtgacaaatgaagccgagattgcgatggcgtctgagtcaaaactcgatcctgacgtggataccggcgacagcgataaccgcaatggtcaggcattgctggacttacaaaacagcaatgtagtgggcggcaacaaaacttttaacgatgcttacgccacgttggtcagcgatgtgggtaacaaaacgtcaacgctgaaaaccagcagcaccacgcaggcgaatgtggttaaacagctttataaacagcaacagtcggtttccggcgttaacctcgacgaagagtacggcaatttgcagcgttatcagcagtattatctggcgaatgcgcaagtattgcagaccgcgaatgcgctgtttgatgcgttattgaatattcgctaaaggagaaggatgacatgcgtatcagtacccagatgatgtacgaacaaaatatgagcggcatcactaattctcaggccgaatggatgaagctgggcgagcagatgtctaccggtaagcgcgttaccaacccatctgacgatccgatcgccgcgtcgcaggcggtagtactctctcaggcgcaggcgcagaatagccagtacgccctggcgcgtacgtttgccacccaaaaagtgtcgctggaagaaagcgtactcagtcaggtgacgacggcgattcaaaccgcgcaggaaaaaatcgtctatgccggaaacggcacgttaagcgacgatgaccgcgcgtcgctggcgacggatttacagggcatccgcgatcagctgatgaacctggcaaacagcactgacggcaatggtcgctatatctttgccgggtataaaacggaagcggcgccattcgaccaggcgacaggtggttatcatggcggcgagaaaagtgttacccagcaggtggattccgctcgcacgatggtaattggccatacgggtgcgcaaatttttaatagcatcaccagcaatgcggtgccggaaccggatggctcggactccgaaaagaatctgtttgtcatgctcgatacggcaattgccgcactcaagaccccggtggaaggcaataacgtggaaaaagaaaaagccgctgccgccattgataaaaccaatcgcggcttaaaaaattcgcttaataacgtcctgaccgttcgtgcggaactgggaacgcaactgagcgaactcagtacgctggattcactgggaagcgaccgtgcgctgggacagaagctacagatgagcaacctggtagatgtggactggaactcggtcatctcctcctacgtcatgcaacaggcggcattacaggcgtcctataaaacgtttaccgacatgcagggaatgtcgcttttccagttgaaccggtaacacctctttttgaaacatatcacgaaactggatatgttttgtctgcccgcgccatccaccccggcgcgggcatttttttagtcgtcattgagttagtggtcatattgtcgcgcccgtagcgacgccatccgtacgtattatcccgcccgatctcataaacgcctggagtgactaaaagacgccatggggtgaggcattgccctgtaaggggcataaaaaagccgacctggcggtcggctttgtatcagcatttacatcattctaccggctgtgggcgtgtcgccggggcgctggcgtgacgtgtggcgctgtgtccgcctgccgcgcctttaccttcaaagtggaaggaaggccgctgccagtcgctatggtgcggggtttccggcacatattccggcgctggcgcacgcgtcatcggcgcgctggcgtgattatgatcgtcaacgcagacaacgtcctgcgacttttccaccacctgggccggtgcgataacggtttcttctgccgtgtgctccacaacagccgcttccgcttttgtctcttcttctggctcgacaacgacaacatcagctacgttttcagccaccgtaatggacgcgtcggcggtttctgctaccggttcggcgtcagcaataacctcttgcgccaccggcgtatcgctttcggcaatcagttgcggctgttcatcaactggcgcggcaatcacttccggatgcgttgtctcgacctcgacgacttccggcgcctgtggttcggcgacggtctgcggctcaacggcaacgttttctactgcctgtaccgacgcttgtggttcgagcgctgcggtcgcagcgataacctgctgttcagcgacaaccggttgtggcagcgccagatctgcttcacgctgctcgtcaacaacctgcgtttcctgaggacggacaatcgggtagcggatccagactttaccggacgccatttctggcgacgcgcaggcgacggttaacggcattggcgattgtgtcgggtagcgctcgtcacgatagcgacggcgacgctgaccgcttacgcgcaggtggcgcggagaacggcgggagcgacgcggcataccggtattatcgcgaggttctacgctatcatcctgctctggcgcgatatcggcgacgacaggtaaatcaactttcgccagctcggtacgcggcgctggaacgggctgttcaacgttttcaaccgggcgcggttcgtcgacgacgaccggcgtgtcaaccgtttcaaccactgcgctgttggtaaagcggactttctgattaagctggcgctgcttgcggcgcggctgaacctgctgaacgcgttcttcctgctcggtctcctggacaggttgttcttcgcggttaagcgcttttacttcctgctgcgcctggcgcttgtcatcattgcggcggcggctgcgttcgcgacgcggcgtctgttgctgttcatcgccggttttcactttttccgccgtttcctgctggcgggtatcgcgcgcttccgcattttgctgctgcgtctggcgacggttacgacgattatcgtcgcggctctcgccgccgtcacgtccggcacggttatcacgggtgtcgcggcgttcgttacgatcgcgacggttgttctgccgtggcttgcgacgatcctgctgacgctccgctttttcttccgctttcggcgcggctgtttcgacggttttcgtttcttcaccgctgaacagttgtttcagcgcgttaaggaagcggctaaacagacccggctgggcaggctgcgcggcggcaacattatcctttttcgccgtggcgacgctaaccgccggttcgacaggcgtcggcgccggaggcacatctggcatagcgaatgtcgccagcgcaggctgctccgggcgtttacgctcggcgtactcttcttcagaaggcagcgccatcgcttcttcgtgcagcttcggcagcatgtagctcagggtcggcgtttcttcccctttgcgtacgcgcagcacggaatagtgcggcgtttccatctgatcgttcgggacgatgacacagcggacgccatcctgacgcgtctcaatagcgttcactgccgtccgtttttcgttaagcagataagaggcgatcggcaccggaacaatggcatggacttcctgcgtattctctttcagcgcttcttcttcaatcaggcgcagaatggacagcgacagagattcgttatcgcgcacggtgccggtaccgctacagcgcggacacacgtgatggctggattcgcccagagacgggctcaggcgctgacgcgacatttcgagcaggccgaagcgggaaatatggctaatctgaatacgcgcccggtcctgacgcaccgcttcacgcagacggttttctaccgcgcgctggtgacgtaccggcgtcatatcgataaagtcgataacgatcaggccgcccaggtcgcgcagacgcaactggcgggcaatctcatcggccgcttccaggttggtattaaacgccgtttcttcgatatcgccgccgcgagtcgcgcgggcggagttgatatcgatggcggttaacgcttcggtactgtcaatgacgatggagccgccggagggcaggcgcacttcacgctggaacgctgactcgatctgcgattcgatctggtaatggctgaacaacgggatttcaccggtgtacagcttaattttgctgctaaaatccgggcggcccaacgcggcgatatgctgacgcgccatttccatcacttttggattgtcgatcaggatttcaccgatatcctgacgcagatagtcgcgaaacgcgcgtacgatgacgttgctttcctgatggatcaggaacggcgcgggacggctttcagcggctttctgaatggcctcccagtgtttcaggcggaagcttaaatcccactgcaacgcttcggcggatttacccacgcccgcggtacgcacgataagccccatcccttcaggaagttccaggctggccaacgcttcttttaactcggtacgatcgtcgccttcaatgcgacgggaaataccacccgcgcgcgggttattcggcatcagtaccaggtagctgcccgccagactgataaaggtggttaacgccgcgcctttgttgccgcgctcttctttatcgatttgaacaatgacttcctggccttcgcgtaacacgtctttaatgttcgggcgaccatgagcgctgtagttagcggggaaatattcgcgggcaatttcttttaacgggaggaaaccgtggcgttctgcgccgtaatcaacaaaagccgcttccaggctcggttcaatacgggtaattttgcctttatagatgttcgcttttttctgctcgtgtccggggctttctatatccagatcgtacagacgctgcccatctacaagggcgacgcgcaactcttcctgctgagtcgcgttgattaacattcttttcatcgtaacttactcattattcttacgttgacgactaagctgcgggcatggtgacgccttaccgggcatgaaccgatggcctcgtgactatttcgcgtcgccaacctcacggttatcgtcagctcaaagaggcgcagagtgtcggttgcctgtatttcatacggaaacacagcgcaattatcagggaagcagcctgggcattactctccagagaagatcctatctaccggtaaggactgcaacccgcagcccgctaactgtctgaaaaatcaatacgtcttacgccattgctgcgttgatgatcggtcagacaaaatgggttattccgctaaactttttgttttaacaagtttcggtgcggaaaccgcatcattattccactgctaaccttgttatagcaagatgacttttaccatttatcacccgcttactcacagttttttcaccagcgtgagccaatcgctttaataaccagcaaaaccgcagtgaaaaatgttcatccactggcgtagacgtctctataagcatagaaaaatgtgtggcgcgaatctcacaggctatttagaatcgccccccatgaaaacagaaacgccatccgtaaaaattgttgctatcgccgctgacgaagcggggcaacgcattgataactttttgcgcacccaactgaaaggggtaccaaaaagtatgatttatcgcatcttgcgtaaaggcgaggtgcgggtgaacaaaaaacgcattaaaccggaatacaaactggaagcgggcgatgaagtccgcattccgccggttcgcgttgctgaacgcgaagaagaggccgtgtcgccgcatttgcaaaaagtggcggcgttggcggacgtcattttgtatgaagacgaccatattctggtgctgaataagccttccggcaccgccgtacacggcgggagcgggttaagttttggcgtcatcgaagggctgcgggcgttgcgtccggaagcgcgattcctggaactggtgcatcgtcttgaccgcgatacctccggcgtgctgttggtggcgaaaaaacgctccgcgctgcgttcgctgcatgagcaactgcgcgaaaagggaatgcagaaagattatctggcgctggtgcgcggccagtggcaatcgcacgttaaaaccgtacaggcgccattattaaagaacattctgcaaagtggcgaacgcattgttcgcgtgagccaggaaggcaaaccgtcagaaacgcgcttcaaggtggaagagcgctatgccttcgccacgctggtgcgctgtagcccggtcacgggccgtacgcatcagattcgcgtacatacccaatatgccggtcaccctattgcgttcgacgatcgctacggcgaccgtgagtttgatcaacagcttaccgaagcgggaaccggtcttaaacgtctctttctgcacgccgcggcgctgaagttcacgcatccgggaacgggcgaagtcatgcgcattgaagcgccaatggataacgccctgaagcgctgtctgcaggtgctgcgtaacgcaaaatagttcctctttcgggcaggttatctgcccgaatctcacttttctcataatatttttgttttgctgtatccgacgcatttttaccgttgtgcactgtttattcttgcgatccggatttcggcgcgtttaaggacgaacagatggccaatactagctggatgcgctcatttactcagcgttggggaaaatacgttatcgtgccgctcgtgatcgcgatgctgaccggttgcgaagggaagggcgatagttcacgacgggctttcgttgagtatttgaatacgcaaatcattacgtctcccgtggtgggcgtctgtgagttgacgccagcccaacgtcaggcttttggtcattacgccgatgactacgatgtactattaactgcctacgggcaaatctttgctgtggtgtatgagaccggccaggaggataagatcaccggtgttattcagtctgagcgtgataatctggttttcctgaacgagctacgtgtggctcgtgacgtaaacaatcgatttatccttcggttgaaaaatgtgagtagtgaaaacagaaaaaaatattctgctttaaagctccccgctgatgtgaagcctgtctttgacgctgcgtggaataaaaccgtaacaccgctggatgagacgatgactcgctattattttctgcgcggaaagcggctcgaccaactggtcgcaatgggcgagtttctgcaaaaacagggaaataaagtccgctttgaaacgaatggaaaagcggtttttgccgacctggcagcaaaagaacactttcaggatcaacaatttaattttttcattacgcagaatgatataaaccatcttactcagcagatggttgaatttataaatagtcaacaagatgcggctgatgctggcggcgttaattaaaggaatgtgtcgtgaggtgaagcaatgttcgggggagggcgtaaactcatcgcgagatggaatttaacgagtcgcaaagggaaggtttcaggacagtaaacgtcctgagagttgttcgcgagaataagtttgtaagccgcttttgacgccgtagagcgcgtcaggcgagtattgagaacatgtgtttttacaaaactgaactgagatggggaattcattaacgcgcacgtacaccgctgttgataccctatgggataaaacgcaccgtacatcggttcgtaataccaatgctttttttctggtcggtgaatggattgaccaggaaacgggcccgcacgaagagagtgaagatcggcaggcgctaaattgttcacaacaagcgctttccagttggttagaactggaagcggtcgaaactgctccccaataaacgggagataactaccaacacgtgcagaaacggcttttagcggtatttgaaaagcctacagagtaggccgtttattgctgtagcgggttgaagccctcccgtcgcagcatctggcacagggcaataagcggcaagccgatcagcgtgttcggatcacgaccctccaggcgctcaaataatgcaatgcctaaaccttcgcttttaaaacttcccgcgcagtgcagcggatgctctttacggacatagtcgtctatttccgcttcgcttaaatggcgaaaatgaacgtcaaaaggctccacttcggtttgtaagtgcccggaggcggagttatacagtgccagtccggtataaaacgtcacaatatttccgctggctttggctaattgctgacgcgctttttcttccgtcagcggtttgccggtgatttcgccgtccagaacacaaatttggtcggagccaataatcaaatgattcgggaaacgcgcggcgagcgattgcgccttcgcctgcgccagccgcagcaccaactgacgcggcgcttcgcccggcatgggggtttcatcaacatccggcgcggcgcattcgaaaggaatcgtcagcttttccagcagcgcgcgacgccagggagaggtagacgcaaggatgagacggggcatattttttccctcagatatagcgtaatgatgagagccatcttaaactatgctcttcggtcttcaagcctgtcatactgactcgtcttgagcgaaaataagtctgtaacccgcaatgtgtgcgaattattggcaaaaggcaaccgcaggctgcctttttctttgactatatgacgttacgaagttaatatgcgcgccctatgcaaaaggtaaaattacccctgactcttgatccggttcgtaccgctcaaaaacgccttgattaccagggtatctatacccccgatcaggttgagcgcgttgccgaatctgtagtcagtgtggacagtgatgtggaatgctccatgtcgttcgctatcgataaccagcgtctcgccgttttaaccggcgatgcggtcgttacggtgtcgctcgaatgccagcgttgcgggaaaccgtttacccatcaggttcacacaacgtattgttttagccctgtccgttccgacgagcaggctgaagcactgccggaagcgtatgagccgattgaggtaaacgaattcggcgaaatcgatctgctggcgacggttgaagatgaaatcatcctcgccttgccggtagttccggtgcatgattctgaacactgtgaagtgtccgaggcggacatggtctttggcgaactgcctgatgaagcgcaaaagccaaacccatttgccgtattagccagcttaaagcgtaagtaataggtcttccccgcggacgcagggataaaccgtaattgaggagtaaggtccatggccgtacaacagaataaaccaacccgttccaaacgtggcatgcgtcgttcccatgacgctctgaccgcagtcaccagcctgtctgtagacaaaacttctggtgaaaaacacctgcgtcaccacatcactgccgacggttactaccgcggccgtaaggtcatcgctaagtaatcgcgcgatactcgatgccttttgcatcacaggcgtgcctgtggtgtaaaagccgaagagtacaagcgtgataaagcttagtgaggatttctccgcgtaagcggagaacaccgaaccaggcagcgacgataccttgacacgtctaaccctggcgttagatgtcatggggggcgattttggtccttccgtgacggtgcctgcagcattgcaggcactgaacgctaattcgcagctcactcttcttttagtcgggaatcccgatattatcacgccattacttgccaaagctgactttgaacaacgttcgcgtctgcagattatccctgcacagtcagttattgccagtgatgcccggccttcgcaggcgatccgcgccagtcgtgggacatccatgcgtgtggccctggagcttgtgaaagaaggccgagccgaagcttgcgttagcgccggtaataccggggcgctgatggggctggcgaaattattgctcaagcctcttgaggggattgagcgtccggcgttggtgacggtattaccgcaccagcaaaagggcaaaacggtagtgcttgatttgggtgccaacgtcgactgtgacagtaccatgctggtgcagtttgccgtgatgggcgccgttttggcggaagaggtcgtcgggatcaaaaatccccgcgtggcgctactcaatatcggggaagaagaaaccaaaggcctcgacagtattcgcgaagcctctttaatgttaaaaacagtcccaaccatcaattacatcggctaccttgaggcgaatgagttactgacgggaaaaaccgatgtactggtgtgtgacggctttacaggcaatgtcacacttaaaacgatggagggggttgtcagaatgttcctttcactgctgaaatcacagggcgaggggaaaaaacggtcgtggtggctgctgttattaaaacgttggttacaaaaaagcctgacgaggcgattcagtcacctcaaccccgaccagtataatggcgcctgtctgttaggattgcgcggcacggtgataaaaagtcatggtgcggccaatcagcgagcatttgcagtcgcgattgaacaggcagtgcaggcggtgcagcgacaagttcctcagcgaattgccgctcgcctggaatctgtatacccagccggatttgaaccgctggacgatggcaaaggcgtaaacctgcgggcgcacagataatatcgttgtctccccggcgccgccagcgtgccagacgtttacaggtaacggtatataaccgaaaagtgactgagcgtacatgtatacgaagattattggtactggcagctatctgcccgaacaagtgcggactaacgccgatctggaaaaaatggttgagacctctgacgagtggattgtcactcgtacaggtattcgtaaacgccatatcgccgcgccgaatgaaactgtcgcgacgatgggctttaccgctgcgaatcgcgcgattgagatggcggggatcgataaagaccaaattggcttgattgtggtggctaccacatcagcaacgcatgcatttccaagcgcggcatgtcagattcaaagtatgctcggtattaaaggttgcccggcgtttgatgtcgcggcagcgtgcgcaggtttcacctacgcgttaagcatcgccgaccagtacgttaaatccggcgcggttaaacacgcgctggtggtcggttccgatgtattagcccgcacttgcgatcctggcgatcgcggtacgatcattattttcggcgatggcgcaggcgcggccgtactgagcgcttctgaagaaccgggtattatctccactcatcttcatgccgatggccgttacggtgaattactgaccctgccgaatgccgatcgcgtaaatccggataacccgatttacctgacaatggcgggcaatgaagtctttaaagtggcggtcactgaactggcgcatattgtcgatgagacgctggcggctaataacctggatcgctcagaactcgattggctggtgccgcatcaggctaacctgcgtatcattagcgcgacagcgaaaaaactcggcatgtcgatggacaatgtcgtcgtcacgctggacaggcacggcaatacctccgcggcttctgtgccgtgcgcgctggatgaagccgtgcgtgacgggcgaattaaagccggtcagctggtattgcttgaagccttcgggggtggattcacctggggctccgcgctgattcgtttctagtataaggatttaaacatgacgcaatttgcatttgtgttccccggtcagggttctcagagcgttgggatgttggccgagatggcggcaaattaccctatcgtagaagaaacgtttgctgaagcttctgcggctctgggatatgatctgtgggcgctcacccagcaaggtccagcggaagaactgaataaaacctggcagacgcagccggcgttattaaccgcttccgtcgcgctttggcgcgtttggcagcagcagggcggtaaaatgcctgcgttaatggcaggtcacagcctgggcgaatattccgcgctggtttgcgctggcgtcatcaactttgctgatgccgttcgtctggtggaaatgcgcggtaaattcatgcaggaagcggttccggaaggcactggcggcatgtctgcgatcatcgggctggatgatgcctctattgctaaagcctgtgaagaatctgccgaagggcaggttgtttcgccggttaactttaactcgccgggacaggtggttatcgccgggcataaagaggcggtagaacgtgcgggcgcagcctgtaaagccgctggcgcgaaacgcgcgctgccgctgccggtgagcgtaccgtcgcactgcgcgctgatgaaaccagcggcagataagctggcggttgaattagccaaaattacctttagcgcgccaacggtgccggtagtgaacaacgttgacgtgaaatgtgaaaccgatgccgccgctatccgcgatgcgctggttcgccagttgtacaatccggtacagtggacgaagagcgtggaatttatcgcggcgcagggcgttgaacatctttatgaagtgggtccaggtaaagtcctcactggtctgacgaaacgtattgtcgacaccctgacagcgtcggcgctgaacgagccggcggcgctgtctgcggcacttacgcaataaaagaggaaaaccatgagctttgaaggaaagattgcgctggtgactggtgcaagccgtggcataggccgcgcaattgcagagactctcgttgcccgcggcgcgaaagttatcgggactgcgaccagtgaaaatggtgcgaagaacattagcgactatttaggtgctaacgggaaaggtttgatgttgaatgtgaccgatcctgcatctattgaatctgttctggaaaatattcgcgcagaatttggtgaagtggatatcctggttaataatgccggtatcactcgtgataatctgttgatgcgaatgaaagatgatgagtggaacgatattatcgaaaccaacttatcatccgttttccgcctgtcaaaagcggtaatgcgcgctatgatgaaaaagcgttgtggtcgcattatcactattggttctgtggttggtaccatgggaaatgcaggtcaggcaaactacgctgcggcgaaagcgggcctgatcggtttcagtaaatcactggcgcgtgaagttgcgtcccgtggtattactgtcaatgttgtggctccgggttttattgaaacggacatgacgcgtgcgctgtctgacgatcagcgtgcgggtatcctggcgcaggtgcctgcgggtcgcctcggcggcgctcaggaaatcgccagtgcggttgcatttttagcctctgacgaagcgagttacatcactggtgagactctgcacgtcaacggcggaatgtacatggtttaatcacgattgaaaaatatttgcgttattagggcgaaaggccgcaaaataacgtaaaatcgtggtaagacctgccgggatttagttgcaaatttttcaacattttatacactacgaaaaccatcgcgaaagcgagttttgataggaaatttaagagtatgagcactatcgaagaacgcgttaagaaaattatcggcgaacagctgggcgttaagcaggaagaagtaaccaacaatgcttctttcgttgaagacctgggcgcagattctcttgacaccgttgagctggtaatggctctggaagaagagtttgatactgagattccggacgaagaagctgagaaaatcaccaccgttcaggctgccattgattacatcaacggccaccaggcgtaagtgaacatctccaggcggtcgttcgaccgcctgagttttatctttttgtcccactagaatcattttccctccctggaggacaaccgtgtctaagcgtcgtgtagttgtgaccggactgggcatgttgtctcctgtcggcaataccgtagagtctacctggaaagctctccttgccggtcagagtggcatcagcctgatcgaccatttcgatactagcgcctatgcaacgaaatttgctggcttagtaaaggattttaactgtgatgacattatctcgcgcaaagaacagcgcaagatggatgccttcattcaatatggaattgtcgctggcgtacaggccatgcaggattctggccttgaagtgacggaagagaacgcaagccgtattggcgccgctatcggctccggtatcggtggtctcggtctgatcgaagaaaaccacagttcgctggtaaaaggcggaccgcgtaagattagcccgttctttgtcccgtcgacgattgttaacatggtagcaggccatctgactatcatgtatggcctgcgtgggccaagcatctctattgcgactgcctgtacttcaggcgtgcataacatcggccatgccgcgcgtatcatcgcctatggcgatgcggacgcgatggtggcaggtggcgcagaaaaagccagtacgccgctgggtgtaggtggttttggcgcagcgcgcgcgctgtcgacccgcaacgataacccacaggcggcgagccgtccgtgggataaagaacgcgatggttttgtactgggcgacggtgccggtatgttggtgcttgaagagtacgaacatgcaaaagcgcgtggtgcgaaaatctatgccgaaatcgtcggctttggtatgagcagcgatgcttaccatatgacgtcgccgccggaaaatggcgcaggcgctgcgctggcgatggttaacgcgttgcgtgatgccgcgattgagcctgctcagattggctacgtcaacgcgcacggcacgtcgacgcctgccggcgacaaagctgagacgcaggcggttaagtcagtctttggcgatgctgcaagccgagtgatggtgagctcgaccaaatcgatgaccggccatctgttgggcgccgcaggcgcagtagagtctattttctctattctggcgctgcgcgatcaggccattccgccaaccattaatctggataacccggatgaaggttgcgatctggacttcgtgccgcatgaagcgcgccaggtcagcgatctggagtacgctctgtgcaactcctttggttttggcggaactaacggttccttgatctttaaaaagatctaagttaagccagagacagacattaataaaaaggtccgcttgtcgggccttttttatcaggcatatcacctcttgttctgcgttattcatcctgccacactaacaggcgacggataaggagccactatgtttttaattaatggccatgcgcaggatcaacttgctgtaagcgaccgggcgacgcagttcggcgatggcagttttacgaccgcacgtattgttgatggcaacatttgccatctggaagcgcatcttcagcgcttgcaggttgcctgtgaaaaattacggatcgcttttagccattggtcgacccttcggcaagagatgacaatgttggccacagggcatgattcaggcgtgttgaaagtgatcattagccgtggtagcggcggccggggatacagcgccatgaattgtcaggcagctacccgaatcctctccgtttctgcttatcccgcttattattctcagtggcgtaagcaaggcatcactcttacccttagtcccataccgcttgggcgcaatccttatcttgccggattaaaacatctgaaccgcctcgaacaggtgttgattcgctctcatcttgagcagacggacgccgatgaggcgctggttcttgacagcgagggatgggttacggaatgctgtgcggctaatttgttctggcgtacaggcgacattgtttttacgccgcgtctggatcaggccggggtgaacggcattatgcgacaattttgtttacgccaactggcgcaatctcctttccaggttcttgaagtacaggcgagagaggaggcagtcaggcaggcggatgagattatcatctgcaacgcgctaatgccgattattcccatacgcgcctatcacgggacgtcgtattcttcgcgaacactgtttcaatttttagccccattttgtgagcatccgaattagttatgaaaaaattgtcaggcgttttccttctgctgttggttgtgctgggtattgccgtgggcgtggggatgtggaaagttcgccatctggcgaacagcacgttacttattaaagacgagactatctttacgctcaaggcgggaacggggcggctggcgcttggtgaccagctttatgatgaaaaaatcattaatcgcccccgggtatttcagtggctgctgcgcgtggagcctgagttatcacactttaaagcgggaacttaccgttttacgacggggatgaccgtacgggagatgcttgagttgctggagagcggcaaagaagcgcaattcccgttgcggtttgtggaagggatgcgccttagcgactacctgaaacagctacgagaggcgccgtatattcgccatacattgccggatgatgactacgccactgtcgctcaggcattaaagcttgcgcacccggaatgggtagaagggtggttctggcctgatacctggatgtataccgccaacaccagcgatgtcgctattctcaagcgagcgcatcaaaagatggtgaaagctgtcgatactgtctggaaaggtcgggccgaggggctgccttataaagatcagaaccaactggtgacaatggcctcgattattgaaaaagagacggctgtcgccagcgaacgcgatcaggtggcctcagtctttattaatcgcctgagaatcggtatgcgccttcagaccgatcccaccgtgatttacgggatggggacgagttataatggtaacttgtcgcgtgcggatctggaaaagccgacggcttataacacgtataccataaccgggctgccgccaggaccgattgcatcgcccagcgaagcgtcattgcaggcggcggcgcatccggcgaaaacgccgtatctctattttgtggccgacggtaaaggcggtcacacatttaacaccaatcttgccagccataatcggtcagtgcaggagtacctgaaagtgcttaaggaaaaaaatgggcagtaattatatcgtcatcgagggcctggaaggcgccggaaaaaccactgcgcgcgacgtggtggtggagacccttgagcaactgggtattcgtaatatgatttttacccgtgagccgggcggtacgcagcttgccgaaaaactaagaagtctggtgctggatattcgatcggtaggcgacgaagtgattaccgataaagcggaagtgctgatgttttatgccgctcgcgtacagctcgtcgaaacggtaatcaaacccgcgctggcgcaaggcgtatgggtgatcggcgatcgccacgatctctcgacccaggcgtatcaggggggagggcgcggcattgatcaaaccatgctggcgacactacgcgatgccgtgctgggcgattttcgtcctgacctgacgctgtatctggatgtcacgccggaagtcgggctaaaacgcgccagagcgcgcggcgatttggatcgcattgagcaggaatcttttgatttctttaaccggactcgcgcgcgctatctggaactggcggcgcaagactcgcgtatccgcaccattgacgcgacccagccgctggatgccgtcatgcgcgacattcgcgccacggtgacgaagtgggtgcaggagcaagcggcatgaaatggtatccatggttacggcccgcctatgaaaaactggtagaaagttaccaggcgggacgtgggcaccatgcgctactgattcaggccttacctggcatgggcgacgaggcgctgtgctatgcgctgagccgttatctgttatgccagcagcctgagggccacaaaagctgtgggcattgccgtggctgtcagcttatgcaggctggcacgcatccggactattacacgctgacgccggataaaggcaaaagcagcctcggcgtagatgcggtacgcgaggtcagcgagaaattgtacgagcactcccgtctgggcggcgcgaaggtggtgtggattgcggatgcggcgctattaaccgacgccgccgccaatgcgttgctcaaaacgctggaagagccgccggagcaaacctggtttttccttgccagcccggagcctgctcgtctgttggcgacattacgcagccgctgccggctgcatcatctggcgccgccgtccgaatcgtatgcgatgtcatggctgtcgcgagaagtgacggcgtcacaagaagcattgctcacggcgctacgtctgaatgcggggtcgcccggcgccgcgctggcgctgttgcagtctgaacgctgggcgcagcgtgaggcgctgtgtcaggcgttaatggacagtttgcatacgggcgactggtatgcggtattaacggcgctcaatcatgagcaagccccggcgcgcctgcactggctggcgacgctgctggtagacgcgctgaaacgtcagcacggcgcgtcgtacctgacaaacgttgatgcggacgcggttgttgccgcgctggcggggccgctatccccggcgcgtattcaggcaatcctgaacgatgtttgccattgtcgtgatcaattacttcatgtgaccggattaaaccgcgaactggtattaaccgatctcattctccgcatcgagcattacctgcaaccaggcaccttgttgcctgttcctcatctttgagagagacattatgtttttagtcgactcacactgccatcttgatggtctggattatcaatctttgcataaggacgtggacgatgtgctggcgaaagccgccgcgcgcgatgtgaagttctgtttagcggtggcgacgacgctgccggggtatcgccatatgcgcaagctggtgggcaagcgcgataatgtggtcttttcctgcggcgtgcatccgttaaatcaggatgaagcatatgacgtagaagaactgcgcctccttgctgcagaagacgatgtggtggcgatgggcgagaccgggcttgattacttttacacgcctgagaccaaaatccgccagcaggcgtcttttattcatcatatccagattggccgcgaattgcataaaccggtgattgtccatactcgcgacgcgcgtgccgatacgctggctatcctgcgcgaagaaaaagtgacggattgcggcggcgtactacactgttttacagaagacagagaaacggccggcaaattgttggatctggggttttatatctctttttccggcatcgtaacgttccgtaacgctgaacagttgcgtgatgcggcgcgctatgtgccgctggatcgattattagtcgagaccgattctccttatctggcaccggtgccgcatcgcggtaaagagaaccagcctgcgatggtacgcgacgtcgcagaatatatggcggtattgaaaggggttgccgttgaagaactggcgcagatcaccaccgataactttgctcgcctgttccatattgacgcgtctcgcctgtcatcaatccgttaaacgagtttttttaaagctcgtaattaataaacaaaacgcgtaaagttcaccgccacaaaaggggcggtgagcgagcttatggaaacattcggaaactcattttggcagaatgtgatactttttaggctatctggcgctgaaacgtgatagccgtcaaacaaaatcagacgtatttattttactctgtgtaataaataaaagggcacttagatgtcctgtccacggcggggttctcccccctcgccaatgcgtgagaacgtagaaaagcacaaatactcaggagcactctcaattatgtttaagaatgcatttgctaacctgcaaaaggtcggtaaatcgctgatgctgccggtatccgtactccctatcgcaggtatcctgctgggtgtcggttccgctaacttcagctggctgccagccgttgtatcgcacgttatggcagaagcgggcggatctgtttttgccaatatgccgctgattttcgctatcggcgtggcgttgggcttcaccaacaacgacggcgtttcggctctggcggcggtagtcgcgtatggcatcatggtgaaaaccatggctgtggttgcgccgctggttctgcatttacctgctgaagagatcgccgctaaacaccttgctgatacgggtgttctcggggggattatctccggtgcaatcgcagcgtatatgtttaaccgcttctaccgtatcaaactgcctgagtatctgggcttctttgcgggcaaacgcttcgtgccgatcatttcgggtctggccgctatttttaccggtgtggtgctgtctttcgtatggccgccaatcggtacggctatccaggcgttctcgcagtgggcggcttatcagaacccggttgtcgcgtttggtatttacggttttatcgagcgttgcctggtgccgtttggtctgcatcatatctggaacgttcctttccagatgcagatcggcgaatataccaacgcagcgggtcaggtattccacggcgacattccgcgctatatggcgggcgacccgacggcaggtatgttgtctggcggcttcctgttcaaaatgtacggtctgccggctgcggccattgctatctggcactctgctaaaccggaaaaccgcgcaaaagtgggcggtatcatgatttccgccgcgctgacctcgtttttgacgggtattaccgagcctatcgagttctccttcatgttcgtggcgccgatcctgtacattattcacgcgattctggcaggtctggcattcccgatctgtatcctgctggggatgcgtgacggtacgtcgttctcccacggtctgatcgactttatcgtgctgtccggtaacagcagcaaattgtggctgttcccgattgttggcgccggttatgcgattgtgtactacaccgtgttccgcgtgctgatcaaagcgttggatctgaaaacgccgggtcgtgaagacactactgatgacgcaaaagcgggggcgaccagcgaaatggcgccggctttggttgcggcgtttggcggtaaagagaacatcactaacctggatgcctgtatcacgcgtctgcgcgtgagcgtagccgatgtagcgaaagtggatcaggctggcctgaagaaactgggcgcggcaggcgttgtcgtcgcgggttccggcgttcaggctattttcggtacgaaatccgataacctgaaaacggaaatggatgagtacatccgtaacagctaagcagtaatgatgttggggagaattaaggcagccattcggctgccttttttaatggcgctttacatgccgctctccgacagtctgtcagaactgataattggcggtgaggctgacgttacgcggtgcgccgtaaacaatggaaccatcaatattggtgtcgtaggttttatcaaacaggttgttgatgtttccctgtacggagaaatttttcgtcacctgatagcgggtaaacagatcgaccagcgcatagctgccctgttcggcgcggaaagtgccgtacggcgtcgtggtatctttgtaaacccgattctgccagttcacgccgccgccgaccgtcagctccggtatcgccggcagacgatagcgggtgaataacttcacgctggtgcgcggaagattagggttcacggcgttaccttcattgtcctcggcaacataccgggtagccccgaaagtcatctgccagttatcggtaattgcgccgttcacttcaaattcgacgcctttgctcaccgttccgtcagtagacttccaggcaaactccccattactgccagggatgggaatagtggttgcctgagcgacgttattctgctcaatgcggaacacggacaacgtggtggtgaggcgactgttcatccagtcggacttcagacccgcttcatagttattaccggtaatcggagccagatattgacccgctttgtcgcgtttattctgcggctgaaagatagaggtataactggcataagcggaccagttgtcgttgatatcataaatcagcccggcatacggcgtggtatggtttttctccatgctgtaggtcagtgtatcaacacgccagttggtataacgagcgccgagaatcagatgcagcgggtcggccagcgaaatgcgcgtagcggcatacagcgatttcatatgcgtggtatcgtcctgcgccagattttgtggcgcccagtgggtttgggggaaattaccgttaaaggcgctgaagttgccaatgtcgtccggaaagacgttcgcccaggcgctaaaatagcggttattctgtttactataactgccgccaaacatcatattgtgctgacggccaaacagctcataagcgccatcggcaaagagatctatggcatctactttgcgcttgccgctgttccagcccgtaccgccgaccacggggtagcttgcgccataaggactcaccagcgtacctgtctctttatcgactaacgcatcgatatacatcattttactgtcgaatttgacctcagtatgggtcgcattcagggtcgcctgccagctttcggcaaaacgctgtttaagcgtgacgaagaatttatttatctctttgttgttataagcccagtccggggcggtactacgcgcgcggtcatagctatttttgctgccatcggtgttccagcgcggcagaccgccccaggttgggctgttgacatcaattttttgatattcataaccggctgaaaggttggtggttgtacccagatcggcatcgacaattccggaaaagaacgctttctcactgttatagcggtccagccaggaatcattattctgataacccgccacgatgcgcccacggacattaccgtctgcggtgagcggactttgcagatccatgacgtaacgctgcttattccagctaccgtattctgtggagacgttacctttgaactcccgactggtggcgtgtttacggatcatattaattgaggcagaaggattaccggtcccggtcatcagcccattcgcgccgcgaaccacctccacgcgctcatacagcgcggtatccgttagcgcatcgcccagattccagcgggactcaaaatacgttggaataccgtcaaccatatagttgtcaatttcaaacccgcgcgagtaatagctgatgcgatcggagtcagcctgacttccgctgatccccagcgtattggtcatcacctcgcccagggtttgcaactgctggtcttccatacgctgctggctgacaatactgaccgactgcgggatatcgcgctgagtcatcggcattttggtgcccgctgcggtcgttttcatgctgtaatcctgttcttcacggtttacggcgtcagcggtcgtctcgccttcgacaataacggtatcctcagccgcgaaggcggcaggcataaatgccatcgccatacccatagctaacagcgacggtgcggcggtggacggaaggtgtttgtcccggcggtattgaatgaaagacatctgaaaatccttgcttgttattggggtaagttcaggacgtatgacgttgaaccttttcattctttgctagttaatgcgcataaaaatgcaaatgagaaatatacgcatttgtattaaatgtgtaaaacggtataaccagggaaactagaaatattttttaagcgtacaaaggcgtcatggctgggggatatggcggtaagtccagcatgtagtcatttttcgcttaataaatcgtgggttaaagttgaaagagcgtcggtaactcgctcatactctatactcgcagtatggctcggcgtagcatgtgcgctgcaagggctattatgaaaaaggaaaacgtcgtggcagaagaaactatattcagcaaaattattcgtcgtgaaatcccttcggatatcgtttatcaggatgagctggtcaccgcctttcgtgatatttcaccgcaggcgccgacgcatatcttgattattcccaatatcctgatcccaaccgtcaatgacgtgacggcggaacatgaacaggcgttaggtcggatgatcaccgtggcggcgaaaatcgccgaacaggaaggcattgccgaagatgggtatcgtttaatcatgaataccaaccgtcatgggggccaggaggtttatcatatccatatgcacctactgggcggccgcccgctaggcccgatgctggcgcataaaggcttgtaagtatgatcaaaggatgcatcgcggtttctctgggcttgctgctgcttaccggctgccggtcacaccctgaaattccggtaagcgacgcgcagtcgctggtgatggagtccacggttctggcggcgggcgtcaccgcagagccgcctgaactgacggcgtctgatatccagccatcagcctcttcccgcgtctataacgaaaggcaagagcccataaccgttcattatcggttttactggtatgacgcgcgggggctggagatgcatccgctggaggcgccgcgtagcgtaaccatacccgcgcgttcgtcggtaacgctatttggcagcgccaattatctgggggcgcataaggtcaggctttatctttatttgtgaggagtgaattttgatgacaaaaatgcatcgctacgctgccattgctgcgctggcgatatttctctccgggtgtatggcgcaacgtcaacctgcgccagttgaagaggtaaaaccagcgccagaacaacccgcgcagccgccgcagcctcctgttgtgccgtctgtgccaacgattccacagcaaccggggccgatcgaacatgaagatcaaacgggccagccagcgcctaaggtgcgccactatgactggaacggcgcgatgcaaccgctggtcagcaaaatgttgcaggctgatggcgtgacggccggaagcgtattgcttgttgacagcgtgaataaccggacgaatgggtcgttaaatgcgaacgaggcaacggaaacgttacgtaatgcgctggcgaacaacggtaaatttacgctggtgtccgtacagcaactctcgatggcaaaacagcagttaggattgtctccgcaggatagtctgggaacgcgcagtaaagctattggcattgcgcgcaatgtcggggcgcaatatgtactttactccagcgcatccggtaacgttaacgcgcctgcattacagatgcagttaatgctggtgcaaactggcgagataatctggtcaggtaaaggtgcggtccaacaacaataatcccttaacgcgcgacgagatcctgtcgcgctattttccccagtatcgtcccgccgtcgccacatcgcaggggctaagcggcgggagctgtattattgcccacgatactcaccgtgtcgtgctgcgccgtcatcacgaccctgacgctccaccagcccattttttacgtcattaccgcgccttatcccaattgccggccagtcttgcgccgcgagcgcttttttatactccaggctggatggcggtagaatatctgcatggtgtggtaaattccgctctgccagatgccgacgaactggcggccttactgtatcatttgcatcaacagccgcgttttggctggcgtatcgcgctatcgccactattggcgcagtactggtcgtgttgcgatccggcaaggcgtacgccgttttggttgcggcggctcaaacagttgcaaaaaaacggtgaacctcgcccgcttcggctcgcgcctttgcatatggatgtccatggcgacaatatagtattaacgtccgccgggttgagactgattgactgggagtatgccggcgacggcgatattgcgttggagctggcggcagtatgggttgaggatgaacgccagcaccgacaactggcagacgcttatgccgcgcgcgcgcgaatcgacgcccggcagctatggcgacagatacgattatggcacccctgggtcattatgctaaaagcagggtggttcgaataccgctggcgacaaaccggcgagcaacaatttatcaggctggccgatgaaacctggcgccagctacgtatgaaaggataaggagagcagtgtgggcccagtaatgttgaatgtcgaaggatgtgagctggatgcggaggagcgcgagatactggcgcatccgctggttggcgggcttattctgttcacgcgtaattaccatgacccggaacagttgcgcgaattagtgcgccagattcgggcggcatcgcgtaaccatctggtggtggccgtcgatcaggaaggcgggcgcgtacagcgtttccgtgaagggtttacccgcctgcccgcggcgcaatctttttttgcgctgcatgggctggaagagggggggcgactggcgcaggaggcagggtggctgatggccagcgaaatgatcgcgatggatattgatatcagttttgcgccagtgctggatgtcgggcatatcagcgcggcaattggcgagcgttcttatcatgccgatccagcaaaagcgttggcaatggcaacgcgctttattgacggcatgcatgacgccgggatgaaaacgaccggtaagcatttccccggccacggcgcggtcacggcggactcccacaaagagacgccgtgcgatccacgtcctgaaacggacatccgtggcaaagatatgtcggtgttccgcacgctgattagcgagaataaactggatgcgattatgcctgcccacgtgatctaccgcgctatcgatccgcgtccggcaagcggttcgccgtactggctgaaaacggtgctgcgtcaggagttaggctttgatggcgtcattttctccgacgatctgtcgatggagggcgcggcgattatgggcagctatgctgagcgcgctcaggcgtcgctggatgcgggttgcgatatgattctggtctgcaataatcgtaaaggcgcagtcagcgtgctggataatctgtcgccgatcaaagcagaacgtgttacacgtttgtatcataaaggttcattttcacgccgggagctcatggactcagcacgctggaaaacagccagcgcccagctcaaccagttacatgaacgctggcaggaagaaaaagcaggtcattaactcgagttttcgtgagggtgccagatgattatttatttacacggttttgattcaaatagtccgggcaaccatgaaaaagtgttgcaattacagtttatcgacccggatgttcggctggtaagctacagtacgcggcatcctaagcacgatatgcagcatctgctgaaagaagtggacaaaatgttgcagttgaatgtggacgagcgccctttaatctgtggcgtggggctgggcggttactgggcggagcggattggctttttgtgcgatatccgtcaggtggtttttaacccgaacctgttcccctatgaaaacatggaggggaaaatcgatcgcccggaagaatatgcggacatcgctacaaagtgcgtgaccaactttcgcgaaaaaaatcgcgatcgttgtctggtgatcctctcgcgtcatgacgaagcgctggacagccaacgctcagcgcaagcgcttcacccgttttatgaaattgtgtgggatgaggaacagactcacaaattcaaaaatatttcgccgcatttgcaacgtatcaaagcgtttaaaacgctgggataacgccatccggcaatatggcgttatcagtgaccggataaccagccttgcggctggtttttttatgctcaattctcgcaaactgtctatcttttcagcatgaaaacttgatgcacatcaattttggtatgaccaatgcaccgttcatgctattctcatatcagaagcttattctcattaacgtaacttgttgttaattaaaggctatgctaataacttttaattaacaattggttaataaatttaagggggtcacgttgactacaccattaaaaaagatcgtgattgtcggcggcggcgctggcgggctggaaatggcgacgcagttaggccataaactggggcgcaagaaaaaagcgaaaatcacgctggtagacagaaatcacagccatctgtggaaaccattgctgcacgaagtggcgactggctctctggacgaaggcgtggatgcgctgagctatctggctcatgcgcgtaatcatggtttccagttccagctggggtcggtgatggatatcgatcgcgaagcgaaaaccatcaccattgccgagttgcgtgatgaaaagggcgaactgctggtgccggagcgcaaaatcgcgtatgacacgctggtgatggcgctgggcagcacctctaatgatttcaacacgccgggcgtgaaagagcactgtatcttcctcgataacccgcatcaggcgcgccgttttcaccaggagatgctgaacctgttcctcaagtattcggctaatctgggcgcgaacggtaaggtcaatatcgccatcgttggcggcggtgcgacgggggttgagctgtcggctgaactgcataatgcggtaaaacagctgcatagctatggttataaggggctgaccaacgacgcgctgaacgtgacgttggttgaggctggcgagcgtattctgcctgcgttgccgccgcgtatctccagcgccgcgcataatgaactgaccaaactgggcgttcgcgtgctgacgcaaactatggtcaccagcgccgacgaaggcggtctgcatacgaaagaaggtgaatatattcaggccgatctgatggtgtgggcggcgggtatcaaagcgccagattttatgaaagagattggtggtctggaaacgaaccgcattaaccaactggtggtggaaccgacgctgcaaaccacgcgcgatcctgatatttatgcgattggcgactgcgcttcctgcgcacgtccggagggaggttttgtgccgcctcgcgctcaggcggcgcatcagatggctacctgcgcgatgaaaaacattctggcgcagatgaatggcaaaccgctgaaagcttaccagtataaagatcatggatcgctggtctctctgtccaacttctctaccgtgggtagtctgatggggaacctgacccgcggttcaatgatgattgaaggacgtatcgcccgcttcgtgtatatctcgctataccgtatgcaccagatagcgctgcatggatactttaaaaccggcctgatgatgctggtgggcagtattaaccgcgtcattcgtccgcgcctgaaactgcattaatttctctgcgtctcaccggctgctcgcgccggtgagcgcttctccatcactcgcttcggagttgtccgaatccttcagctttaccgcctcatcccgcatttttcatcctcattccgattggctttgttcgcatactggttgcaaaattgttaccaatagcaacgaaggaggaactcccgtgaataaatcaatgttggcgggtatagggattggcgtagcggctgcgctgggtgtggcggcagtggccagtctcaacgtatttgatcgtggtccgcaatatgcgcaggtgatatcggctaaaccgattaaagagacggtaaaaacgccgcgtcaggagtgccgtaatgtcacggtcacgcatcgcagaccggttcaggacgaaaaccgtattgccggctcggtgcttggcgcagtagcaggcggcgtgattggacatcaatttggcggcggtcgtggtaaagatgtggcgacggtcgtcggggcgctgggcggcggttatgctggcaatcaaatccagggatcaatgcaagaaagtgatacttacactaccacgcagcaacgctgtaagacggtgtatgacaaatctgaaaagatgcttggctacgacgtgacctacaaaattggcgatcagcagggcaaaatccgcatggataaagaccccggaacgcaaattcccctcgacggcaatggccaactggttctgaataacaaagcataaaaaagctgtactctgcaagttagcccctcattcgctcaggctgaggggcttttttttatccgaagccgcgtcgttcaggacttgatcagttcaggccagatgcgcagagtcgtacgcgtaatttgcatcagttgttcgaaggtggcaccttcacgggcgctgatcgacattccctgtaaaatacagtttatatattctgcgagcgcctgcgggttacagtgcgccggaatttcaccgcgctcctgacgttggcgcagaaactggatgagcgtctgttcctgcatggcgtggcgtgattttaccgtgcgggcgatatcgcgcgaggaggcggccagggtggcggacgtattaatcataaagcagccagccggcgtgtctgtactggtaaagcaggcggcaatttctgtgaagtaatcttccagcgccgattctacgcttttctcttcacaaaagagctgggcttcgtgttttgaggcaaagcgagtgatgtagcgatccaggacagcgcgaaataatccttttttgttagtgaattccgcatagagagtaggcgctttcgccccggtagcctctacgagatcggcaagcgaagttgcttcatagccgtgctgccagaagagagtcatggccttatcaagcgcggcttccctgtcgaacacttttggtcggccacggcttttcttcgcgcaactcgtggtatccgttgtcatgatgccgttgtacctgtttaaagagcggtctctctattataaaaacaaaccacttctggctccagagtattcattagaaaaataaatcaattctattcacatgaaaaataacatctttataaattatataacgatcattataaaaagaggttgacgtgtgatgtagatcacatctatgattaacttatcgatcgttaagttaatgcttacgacacccattcatctgctaaaggtcatcactatgaaaaacgtaaaaaccctcatcgctgctgccgtactgagttcgctctcattcgccagcttcgccgccgttgaagttcaggcaacgccagaaggtcaacagaagttcggcaccatttccgcgaatggcggcacgaatctgggctcgctggaagatcagctggcgcaaaaagcgcaggagatgggggcgaagtctttccgtattacctctgttaccggcccgaataccctccacggtacggcggtaatctataagtaagcattaaccctcattaatgccgctgcgattgccacaataaaaagaaaaagcctcgcgatgcatcgcgaggcttttttgtcggtcagctattcacgcttacagcgactgcggtttcgcctctgcttgacgggttacatccaccggcattccggaacgcacttccataacatgttccatcaccgcagcatcggtctgcggcgcgtccttaaaggcctgcatcgggccattcagcacaatcggcaacacctgcggatcgtcgcctatatttttagacagcggctgatgaacttccaccagtcgcacgccgcctggctccaccgaggctttaatcggcgtattgataatattcactttggttcccggcgtgacctgacggaacaatgtctctatatcaccgtcgcgcagacggatacagccggaactgacgcgcataccaatgccaaaatcggcattcgtgccatgtaacagatagacgccgccgtaggccgctaaacgaatcgcgtgatgtcccattgggttatcgggaccggcaggcaccacggcggggagatcgataccttgcgctttataacgggcgcgaatattggcggtcggcgtccaggttggattggcgcgtttatccgaaatggtcgtcaccatcgttggcgtcagggtatcgccgcccagttggccaatcccgatagggtagaccgtgaccgtatttttccccggttgataatagtaaagccgtaattccgcgaggttaatgacgataccttcacgtggcgcgtccggtagcagcgtttgcagcggaatcgttagcacgctgcctgcgcgtggcacataaggatcaatgccggggttggcctgtaacagggctaaaaagcccacgttatattttttggcgatcgcctccagcgagccgccgtcgtcttcaacgacatggaatttattttctcccaccagtcgactgccggggggcggaagaggccacgtattcgcctgcgcgggaagggcaagcatgatggtcgcggtaagcgcaagcaacgcccaccagcgagagagtcgcgtattgttgaacattataataaacccatgattattatgtggttatttttataaaagaggaaataagaattatggcggttggctgtgtctggaactgcagggaagtgcaaagaatttgtaaagattaggccggacgcagagtaatgacgcccggcctgacgcttatgcaatagcgttttcttccagttgctgcataaactggcgtacccagtctatacgcgttttacgttcgcttaaatcctgaataaacttgaggcgcgtcgggccatccagacggaaatgctgcggctgtttttgcagcaacccgataagccaggcggggtcaacgtggtttttctcggcgaactcaatcgttccgcctttctcgttaccctccagttttcggatgccgagcttttgcgcctgttggcgcaggcgggcgatatccagcagattacgcgccggatcgggcagcaggccgaagcggtcgatcaattccactttgatctcctccagctcgttttcgttcttcgcgctggcaatgcgtttatagaatgacagccgggtattaacatccggaataaaatcatccggcagtaacgacggcattcgcagctcgacttccgtttgctgactggtgagatcttccagcgagggttcgcggcctgctttcagcgcatcaacggcgttttccagcaattccatgtagagtgagaagccgatggtttccattgagccgctttgctcttcgccaagcagttcgcccgcgccgcggatctccagatcgtgggtcgccagcgcaaacccggcgcctaaatcctccagcgacgcaatcgcctccagccgtttttgcgcatcggtggtcatggccttaggatgtggcgtcaacagccaggcgtaggcctggtggtgcgagcgcccaacgcggccacgcagctggtgcaactgcgcgaggccgaaatgatccgcgcgttcaatgatgatcgtgttagcggtgggaatgtcgatccccgtttcgataatggtagtacacaccagcacgttaaaacgttgatggtggaaatcgttcatgacccgttccagctcacgttcgcgcatctgcccgtggcctatagcgattcgcgcttccggcaccagttccgccagccgctctgcggctttctgaatattttcgacgtcattgtacaaatagtaaacctgaccgccgcgcaggatttcacgcagaatcgcttcccttaccaccaggctatcatactcgcggacaaaggtttttaccgccagacgacgggcagggggggtggcgataatggagagatcgcgcataccgctcatcgccatattcagcgtccgcgggatcggcgtcgccgtgagcgtcagaatatcgacatcggcgcgcatcgccttaattcgctctttgtggcgcacgccgaaacgatgctcttcatcgacaatcagcaggccgaggtcgcgcagcttcacatcgctttgtagcagtttatgcgtaccgatcagaatatcgatcttaccctcggcggcttccgccaggatttgtgtctgctctttggcgctgcgaaagcgggacagcatctcaatgcgtaccggccagttggcgaaacggtcgcggaagttgtcatagtgttgctgcgccagcagcgtagtcggcaccagtaccgctacttgtttatggttttccactgccaggaacgcggcgcgcatcgccacttcggttttgccgaagccgacgtcgccgcacaccagcctgtccatcgccagcggttggcacatatcgctcaatacggcgttaatcgcctgtgcctgatcgggcgtcgtttcaaacgggaagctgtcgcagaataactgatactgctcacgatcatgcttaaaggcaaaaccctcttttgccgcccgttgcgcataaatatccaacagttccgctgcgacatcgcgcactttttccgccgctttctgccgggcgcgcgaccaggcgtcgccgcccagtttatgcagaggcgcactttcttccgcgccgccggcatagcggctaatcagatgcaatgaggagaccggcacatacagtttggcgtcattggcgtaggtgagcatcagatactcacccttgatgccgccagcctccagagtggtcatgccggcatagcgtccgacgccgtgctccagatgcactaccggctgaccgacgtggagctccgccaggttacgaatcaacgtatccgggttgatcgtgcggcgggaatccaggcggcgacgcgccacccgctcacccaaaagatcgctttcacaaatcagcgccagattgcgttgggtgtcgataaagccatgttctgcggcgccaatcatcagatagcgtcccgcatcctgcgcctcgtccaggcgtaatatccgcttcggcgcgatttttatgcgagccaggagctctcccagagcttcgcggcgtccttcgctttccacagaaaaaatcaccggaccgctgaaagattcgaggaacttacgcagcgcgtccagcggcgctttctgctgcgcctggatagccaaatccggtaatttctggaaaccgagattggtattggcggctttttccggcagatggtcggttttaagctggaggcgaggccagcgtttaagctcggaaaagagctcatccacccgtagccagagggcttccggcggcaaaagcgggcgcataggatcgacgccacgattttcaaaacgcgccagcgtatcggcctgaaagcgttcggcgctggtttccagcgagccggtattcaccaccagagtattggcggggaaatagctaaataatggcggtaacggttcgctgaaaaagagcggctgccagtattcgatcccggcgggcagagtgcctttgctgacctgctgatagatgtgctcggcgtcgcgttttacctcaaaggtatcgcgccactggctacggaaaagctcaatagcggctttgtcggtaggaaattcgtgcgcgggcaacaaattgatggcctcgacctcctccagcgtacgctgggtatccgcgtcaaacagacgcaggctgtcgatttcatcatcaaaaaagtcgaggcgataaggctgttcgctgcccatcggaaagagatccaacagcgcgccgcgcgtcgcgtattcgccatgctccatcacctgatcgacatgccgataaccggcgctgtcaagctgcgcgcgcagagcgtcgcgggacagccgctggccttttttcatcaccagcgcatgaccatgcagatagctatgcggacaaacgcgctgcatcagggtgtttaccggtacaatcaagacgccgcgctgcatcgacggcaactggtagagcgtggacaggcgcgaagagataatttcctgatgcggggagaagctgtcatacggtagcgtttcccagtccgccaggttcatcaccatctgatcggtaaactggcggatttcatcatgcaatcgcagagcattttgcatgtcaggcgctatgagtaccaccggaccggcatggcgttcggctatctccgccaccagcgtagcgcaggcggcaccggtaagttcgcccaactggcgctgatcgcccgcttttgtcggcagcgtgtaacgttgtttttcaggcataacggttgtcagtatctctttttgttttacgccgcactctacgcgtcacccttcaggctgcttcatggttggctgcacgccgggacagcatgaaggactcaggtattcaggggcatatgactgataagcaatgttctttattatccgcgatcgttgtttattagcaaattgaatccgccgcataacgcgccgaacaggtaaagtatgaacatgtaagtgacttgatttgtcggcctttttcagaataacgctgacgaactcttacggttcagacatttacgcattccgctttcgcttatatactcgggactttgctaacagcaaccagacggattacatgtatcaacctgtcgctctattcattggcctgcgttacatgcgcgggcgtgcagcagatcgcttcggtcgcttcgtttcctggctttccactatcggcattaccctgggggtgatggcgctggtcacggtattgtcggtgatgaacggttttgagcgcgaactgcaaaataacattcttggtttgatgcctcaggccatcctctctgctgaacatggttctcttaacccgaatcagatgccggaaaaagcggtgaatctgcaaggcgttaaccgtattgcgccgctgacgacgggcgatgtcgtactgcaaagcgcgcgtagcgttgcggttggcgtgatgttaggtatcgatccggcgcaaaaagatccattaacgccgtatctggtcaatgtgaagcaaagcgaattacagccgggtaagtataatgtcatcctcggcgagcagctcgccggacagttaggggtcaaccgcggcgatcagattcggctaatggtgccatctgccagccagtttacgccaatgggacgcctgcccagccagcgtctgtttacggtgattggcacatttgccgccaatagcgaggtcgatggctatgaaatgctggtcaatattcaggacgcgtcgcgtttaatgcgctatccggcaggcaatattaccggctggcgtctgtggctggatgaaccgctgcaagtcgataccctcagccaacagacgctgccgcaaggcacgaagtggcaggactggcgcgaacgcaaaggcgagttgttccaggctgtgcgcatggaaaagaacatgatgggattgttgctgagcctcatcgtggcggtcgcggcttttaacattattacttcgttgggcctgatggttatggagaagcagggtgaagtggcgattttacaaactcaagggctgacgccgcgacaaattatgatggtctttatggtgcagggcgccagcgccgggattatcggcgcgctgttgggcgccgcgctgggcgcattgcttgccagccaactgaataacctgatgccgatcatcggcgcgtttctggatggcgctgcgttgcccgtggcgatagagccgttacaggtgatcgttatcgcgctggtggcaatggccatcgcgctgctttctacgctttatccttcctggcgcgctgccgccactcaacccgctgaggctttacgttatgaataagatcctgttgcaatgcgacaacctgtgcaaacgctatcaggaaggcaccgtacaaaccgacgtgttgcacgatgtcagcttcagtatcggcgaaggcgaaatgatggcgatcgtcggcagttccggttcgggtaaaagtacgttgctgcatctgttaggcgggctggatacgcccacctccggcgatgtgatttttagcggccagccgatgagcaaactctcttctgcggcaaaagcggaattacgtaaccagaaactggggtttatctatcagtttcatcatctcctgccggattttacggcgctggaaaacgtggcgatgccattattgattggcaaaaagaaaccggcggagattgacgctcgggcgcgagaaatgctgcacgccgtagggctggagcatcgcgcaacccatcgaccttcggaactttccggcggtgagcgccagcgtgtcgcgatagcgcgcgcgttggtgaataacccgcgtctggtgctggcggatgagccgaccggtaatctcgatgcgcgtaatgccgacagtatttttgagcttctgggcgagttaaatcgtctgcagggaaccgcgtttctggtggtgactcacgatttgcaactggcgaaacgtatgagccgccagcttgagatgcgcgatggccgcctgacggcggaactgagcctgatgggggctgagtaatggcgtcgcctttatcattgttaattggcttgcgtttcagccgtggacggcggcgcggcggtatggtttcgctcatttccgtcatttctaccatcggtatcgcgctgggcgtggcggtgttgattgtcggtttaagcgcgatgaacggtttcgaacgcgagttgaataaccgtattctggcggtggttccgcacggggagattgaagcggtcaatcagccgtggaccaactggcgtgaagcgctggcaaaagtgcagaaggtgccaggcattgccgccgccgcgccgtatatcaattttaccggcctggtagagagcggggccaatttgcgcgccattcaggttaaaggcgtcgaccctaagcaagagcagcagcttagcgcgttaccgtcatttgtgcaaaatcacgcctgggatcatttcaaagcgggcgagcagcagatcattatcggtaaaggcgtcgccgatgcgctgaacgtgaaacagggcgactgggtgtccatcatgatccccaatgcgaatgccgaccataagctgctccagcccaaacgcgtgcgtttgcatgtcatcgggattctgcaactgagcggccagctcgatcacagcttcgccatgatcccgcttgaggatgcgcagcagtatctggatatggggtccagcgtttccggtatcgcgcttaaagtccacgacgtgtttaatgcgaacaaactggtgcgtgacgcgggtgaagtgactaacagctatgtctacattaagagctggatcggcacctacggctatatgtatcgcgatatccagatgattcgcgccattatgtatctggcgatgattctggtgatcggcgtggcctgttttaatatcgtttccaccttagtgatggcggtaaaagacaaaagcggcgacattgcggtattaagaacgctgggggcgaaagatggtttgattcgtgccattttcgtctggtacgggctactggcgggcttgctgggcagcttgattggcgtggcgatcggcgttgtcgtttcgcttcagcttaccgccattattaatgggattgaaaaggcgatcgggcatcagtttttgtccggcgatatctattttatcgacttcctgccatccgaattacattggctggacgttgtttacgtactggtcacagcgttgttgttaagcttactggcgagctggtatccggcgcggcgggcgagcaacattgaccctgcgcgagtattgagcggccagtaatcgcggaatataaaaacaaggagcggtgatgtattacgggtttgacattggcggaacaaagattgcgttaggcgtatttgactcaacgcggcggctgcagtgggaaaaacgggttcccacgccccataccagctatagcgcctttttagacgccgtatgcgaactggtcgaggaagccgaccagcgatttggcgtaaaagggtcggtagggattggcatacccggtatgccggaaaccgaagacggcacgctgtacgccgcgaatgtcccggcagccagcggtaagccgttgcgcgccgatctcagcgcccgactggatcgcgatgtgcgtctggacaatgacgctaactgttttgccttgtccgaagcctgggatgatgaattcacgcaatatcctttggttatggggcttatcctcggcaccggcgtcggcggtggcctggtgctaaacgggaagccgattaccggtcagagctatatcaccggcgagtttggtcatatgcgtttgccggttgacgcgctaacgttgatggggtttgattttcctctccgccgttgtggatgcggtcagatgggctgcattgagaattatctgtccgggcgcgggtttgcgtggctatatcagcattattatgatcaatcgctgcaggcgccggagattatcgcgttgtgggagcagggcgatgagcaggcgcacgcgcatgttgagcgctatctggatttactggcggtttgtctggggaatatactgacgattgtcgatcccgatttattggtgatcggcggcggactatcgaactttacggcaataacaacgcaactggcggaaagactgccgcgccatctcctccctgttgcccgcgcgccgcgcattgagcgtgcgcggcatggggatgcaggtgggatgcgcggtgctgcttttttacatcttaccgactaatcaaaaaaagaggttgttatgcagtcgcgtcggtttcatcgattaagccgctttcgtaaaaataaacgtctgttgcgtgaacgtctgcgccagcggatctttttcagagacagagtggtgccggaaatgatggaaaacccaagagtattagtccttacaggtgcaggaatttctgcagagtctggtattcgtacgtttcgcgcggcggatggcctttgggaagagcatcgggttgaagacgtggcaacgccggaaggattcgcccgtaatccggggctggtgcagacattttataatgcccgccgtcagcagcttcaacagccggaaatacaacccaatgcggcgcatctggcgttagcgaagcttgaagaagcgcttggcgatcgctttttgctggtgacgcaaaacatcgacaatttgcatgaacgcgcgggcaatcgcaacatcattcatatgcatggcgagctgttgaaggtgcgctgttcgcaaagcggccagattctggaatggaacggcgatgtgatgccggaagataaatgtcactgctgtcagttcccggcgccgctacgtccgcacgtggtgtggtttggcgagatgccgcttggcatggatgaaatttatatggcgctgtcgatggcggatatttttatcgccattggcacgtccggtcatgtctatccggctgcgggttttgtgcatgaagcaaaactgcacggcgcacatacggtggaactgaatcttgagccaagccaagtcggcagcgagtttgaagagaagcactacggcccggcaagccaggttgtgccggaatttgttgataaattcctgaaagggctgtagtgctgtttgcccggtaacgccttatccggcctacatttcacgttacgttcatctgtaggcccgacaggcgctttggctgaattagcgtcctgcttttagcttctgataatactcttcataaatggcgctggcgtcgccgacatcgttttgccactcgcctttgctgatggtttgcgcatccggatagagcgacttatcattggcgacctccgggcttaacagcttacgcgccgccaggttgggggtagggtagccgatggtttctgccacctctttcgcgacgtcaggacgcagcaggaagttgattagcttcagcgcgccctctttatttttcgcgtttgccggaatagccaggctatccatccagaaaataccgccttctttcggccagacgacctccagcggcgtgccagcctgacgagcaacgaaggccgaaccgttccacaccatccccagattgacttccccttccatatacggattcgccggattatcggagttgaaggccgctacgttcggcatcagttttttcaactcttcatatgccgcttcgatctctttcggatcggtagtgttaccggaataacctagcttgcgcagcgccatctggaagacttctcgcgcatcgtcggttaaaagcaggctgtttttatattccggtttccacaagtcagcccagctggtaatggtttttggatcgatagcatcgctgttcacgccaatcgccgttgcgccccagatatacggaacagaataatcgttgttggggtcaaacggtttgttgagcatttccggatcgaggttgtggaaattggttaatttcgacttatcgatcttctggatcatgccttctttgcgcattttgtcgacatagtatgtagaaggaacaaccaggtcatacgcgccatctttataggttttgagtttggcatacatggtttcgttcgactcgtaggtcgaataaatcaccttaatgccagtctctttagtgaactgttccagcaggcccggcggcacatactcagtccagttatagaaatagagcgtgtcgttgtcggaggcatgagcggcactcatacccagcgccagggcgcccgccgcgagcaggtggcgtgaccattttttcatttaacgtcccctgaattacgggccttatcggcccttggttttatcacgagcaataagctggctggcaatgaccattaccagagacagcaccaataaaacggtcgccagcgcgttcacttctggtgaaacgccgacttttaccatggaataaatctttaagggtaaaatttcatagcccggcccggtgacaaacgacgagaccactacatcgtccatcgacaacgtaaagctcagcaaccagcccgccgccaccgccggcatcgccagcggcagaatgattttgcgtaaaatcgttacctcactggcccccaggtcttttgcggcttccagcattctgacatcaaagcctttcaggcgcgaatagaccgtgacgaccacaaacggcaggctaaaggtgatgtgcgagaacagcaacgaccaaaagcccagttgaatgccgagtaacataaacagcaccagcagggagatcgccatcacgatatccggcgacatcattactacaaacagcatcccgctgacgaatggcttcccgcgaaagcggtagcgataaagcgccaccgcggttaacgagccaatcaacgtggcgaaggtcgctgaaaaaatcgccatcgtcagtgaatgttgagcggcctgcaacagactgtcgttattgactaggagttcgtaccatttagtggtaaagccctgccagttaatgccgaaccgcgaactgttgaaggagttcacgatcagaataatgatgggaatatacagatacgcatagatggcagtcatgaaaccgccacggagcagccgaccgatcattcaagttccaccttcttattcagaggatggggtgcttttagagtattgaaaatgatcaattttttctcttctccaaaatctctccaaaacgtctcgcggttatcagcagccaggaagaagcaagctgccgcttgaagccgcgaattttacaacaaattgccagacgagcgggaaaaaaaggccatttaaatgactattctcatccgatccggtcatatgcggcattattgtgcctggcaagaggttactcagtaggcaaacaggaagtacgtgagtaaaccctgaacgtgacgtctgagaaagcgtcgtctgattttataaaaaacaacataaacagccgctttgttgttctgagcgaacgtgtagcgtggttaactgttcttccgccattttttgtatagcctgggggtctattctaaaaatggcgtgaaaaacctgatcagagatggcttcgactatctcagctaacatactttggctggtgctgggatccgttacgaggaacgcctgaaacgtcttatccgctagtaaaacctcttttaccattttttcaataggtatgtgggtatgcggtggtggtatttcaagctgttttaatccacacatcgccattgtttctaaaaatgcgttttgctgagtactttcggatatattcgcatggtgtaaaatgcgcgttgtcttttcaatcccagactgaattttcgctgccaggtaggttgccttttcttgcgctttccacccatctaaatgtccttttctcaattcagtatataaatacccctctatgttgtctaatggaaccgataatatcggcgcgccagcaggattgagacataatgtcgaagggagggggtagtctacgatttcgctatatcttctcttaatcatggccgtcatttgtggatgcgattttaaaatatccgggcgatctttcattaaaaaataaagattccccatgacttcacagctaaaggtatcggtattttgagtgatacgtaacaattcgttctcttcgttttgatccatgatgcgaagaataatggtggcatcattttcatgaggattatgaacctgaaatctatctctttgcgatgcgcaggctaactctttcaactcaaaaaaaatctctgtaagccgctctcgtgtgggggcgcgttcggcaaacaacatctcatgtagacaacggtccgcttttgctttgccagtagaaaaaaagaagtctttaattttttcccataaaactttccaccatgcttctttcgtattccttggggagttggtaaggatttcactttttaaaaaaccattccctatagtaatcggcatattaatctcacttatactggagtaaaaatgactacataattgattaaatcgaccctttttatctcaactgcgggcgcatcggatgtaatataatttttaaaagagactggcaatcagtataaaacctgagagcttcgcgtataaacgcattactgtctgtgatagcgtcgctacaggtaaaaataaaagaaggactaccgcggatgatgttgtagatttgcaatactggcggcaacttctttcatgcgttttttatgccgaaggcatgaagtttacccttgaataaacttcatgcctggatgcgtgtggatttgttagcgttgcgcaattaatcgcttatatcactcaccttcttattcaataagcgggaagcccgccagtaaatcaacagcatgagtcccatcacaatggtcagcgtaatgctggtagccgcgccaaacggccaatcgcgaatattcaggaactgtaccttaatgacgttaccaatcagcaggtttttcgcgccacccattaaatcggagacgtagaacaggcccattgccggtagcatcacgagcaggcaaccggcgacaatgcccggcatggttaatggaataatgatgcggatgaacgtttgcattttactggcgccgagatcgcgtgcggcctccagtagtggtttgtcgagcttctcaatgctggagtagagcggcatgaccataaatggcagcaaaatgtaaaccaggccgataataacggcgctcggggtgaacatgatgcgaatcggtgtatcaatcacgcccagccacagcaggaattcattgagataacctttagtgctcaggaatattttcagcccatagatgcggatcagtgagttggtccagaaaggaacaatcagcaaaaacagcaataacggacgtatcttttccggtaacttcgccagaaaccaggcaaaaggatagcccagcaccaggcaggagagggtggcgatcagcgccatattcagagagtgcaggagcacttcaaaatagagcggatcgagcaggcgcgcgtagttatccagcgtaaagaccatcttgacgaaactggcgtcgtcacgggtcagaaagctggtgccaatgatcatcaggttgggcagaaaaacaaataacacaagccaaccgacgatagtgacaatcactacattctggaatttacttgtgttcttcatcagccagtacgacctcccagctttctacccaactaatggccattttttggtcaagtgaatggtcgaagtcaggatcgtcttcgttgaagaattcgctgaccatcaccattttgccattttccagttcaaccaccgactccagcgtcatacctttataattgcgctcgcgcacgtagccgataagcccttcgatgtggttatcatcgttgatctcttcgacgcgtagatcttccggtcgcagcaggacgttcagtttttggcctggttcgacagcgaaattgacgtatatattgcactcccgaccttctacgctggcgcggacgcgctgttcatcaagccgttcaatgacggttgcgtcaaagcggttaatttcgccgataaaaccggcgacaaacaggttttttggctcttcatagatttcacgcggcgtgccgtcttgctcaatcacgccattacgcattaccacgatacgatcggacatggtgagcgcttcttcctgatcgtgagtgacaaaaacaaacgtgataccgagtttacgctgtaatgctttaagctcgttctgcatttgtttgcgcaatttatagtccagcgcggaaagcgattcatccagtaataacaggcgaggtttattcaccaccgcgcgagcgatagccacacgctgctgctgtccgccggaaagctggtgcggtttacgttgtgcaaactcttcaagctgcaccatacgcagcgcatcggtcacgcgaggcgctatctcggcggctggcgttttttgcatccgtaagccaaacgcgacattttcaaacaccgtcatatgcggaaataaagcgtagctttgaaatacggtatttacataacgattttcggcgggaacgtgggtgatatcctggttatccaacatgatatgcccggcatcaacggtttccaggccggcaatcaggcgaagaacggttgttttaccgcagccggaagggccaagcagcgtgaggaattcgccattgttaatggtcaaatccagttgcgaaatgacctctttgccatcgaaacttttgctaattcccgacaaaagcaccagcggtgaaagcgaacgcggttgattattcaatttcttactctgtcccatgtaaacgcaacggatggctgaccgctgcggggtttgtggttaaccaccttaatcactcttaatgagggcggtcattctacggcaaaccactgtgatcgccaatccttgttgcgaattactgacttagctttatagtcagaaagcgtgtcaaagtgaaatattcttgtttgcagggataaaagtgacctgacgcaatatttgtcttttcttgcttattaataatgttgtcacgaaaagtgagggtgactgcatggataaactacttgagcgttttttacactacgtatcgctggatacccaatcaaagtcgggtgttcggcaggttcccagcactgaggggcagtggaagttactacgtttgctcaaacagcagctcgaagagatggggctggttaacattacattaagtgaaaaagggacgttgatggcgacgctcccggccaatgttgagggggatattcccgccattggttttatctcccatgtggatacctctccggatttcagcggtaaaaacgttaacccgcagattgtcgagaattatcgcggcggcgatatagcattagggattggcgatgaggtgttgtcacccgtgatgttcccggtactgcatcaattactgggacagacgctgattactaccgatggtaagacattgctgggcgcggacgataaagccggcgttgcggagatcatgaccgcgctggcggtgctgaaaggtaatcctattccccacggcgacattaaagtggcgtttacgcctgacgaagaggtagggaaaggcgcgaagcacttcgatgttgaggcctttggcgcgcagtgggcatatacggtcgacggcggcggcgtgggagaactggagtttgaaaacttcaatgccgcctcggtgaatatcaaaatcgtcggcaataacgtgcatcccggtacggcaaaaggcgtgatggtcaatgcgctgtcgttggcggcgaggattcacgcggaagtgccggcggatgaagcgcctgaaaccaccgaaggttacgaagggttttatcatctggccagcatgaaaggcaccgttgaccgggccgaaatgcactacatcattcgcgatttcgaccgtaagcagtttgaagcgcgtaaacgcaaaatgatggagattgccaaaaaagtcggtaaggggctgcatccggactgctatatcgaactggtgattgaagacagttattacaatatgcgcgaaaaagtagttgaacatccgcatattctcgatatcgcccagcaggccatgcgcgactgtcatattacgccggagatgaaaccgattcgcggcggtacagacggggcgcaactgtcgtttatgggtctgccatgtcctaatctctttaccggcggatataactatcatggtaaacatgagtttgtgacgctggaggggatggaaaaagcggtacaggtgattgtgcgtatcgcggagctgacggctaagcgcgggcagtagcgaatgttacgcattgtggtgaagcgttttattatttatggcgggatattttccgccataaatttttctgcctggagcgccgaatatacgccttcctggtcccagcgccagcaacaatctgcagcatgttttatgactggcgatgaaacctgcatgacgtttattgatgatgcggtgaggctggcctcgcagcaatatggcaaacgctcaatacagcttgttcgtagcctgctattacaaagcgatatttatcaatggctgggtaaaccggagttaacgccgcaaatgctgctgcgagcgcgggcaataatgaaaacatttccggcggacacttatccgggcgatcgggccgatatgtttgaacacctggcggcctttaatgtttacagtgacgatcgttatatagagtattcaccgacagagcagtggcgatacgagatcaaggttgattaccgtcagcagatagcctggcaagagcaggcattaacgtggcgtcttaaagacaaaaaggcatcgacggaagcattggtttataccttaaacaggatgcgcgacgcttattctgatgcgctggaagagcgggatgtcgaatgtgatagtgcgcgtaaagcctattatttggcgaagatagacgcaacggagcggcagtggctgagcgttattttacgagataaaacctgggataatcgtgagcgcgtcgcctcttttttgcagcagaaagcggatattgcttataatgcagggcatattagcgaggcgattaatgcgctaagtcaggcgctaaaaattgagcaaacgctttatggcgccgaattcggcgaaatgacggttgacagcaataatcttgctggcttttatgcacagggccatcattataaggaagcgaaagatctctaccttaaacttatcgcgtattaccagagccgtttaacgccaatggcgacggtaatatcacgattacgcttttatttgcccgaaaacatcgacctggacagtacctccctctatctcccattgctggcagaatataaacgtcggcagtccgacgtatcaatggtgttgtatggtatttcgctgctttatcagagtaatcaagaacttgaacaagcaaaagactttgcggaacgcgcctttacgcttgatgccgtagcttatccagcaaagatgcagtatgaacgattacagcaactggctaatattgccgaaggtcttggagataacgtactggcgcggcgctatcggcaaatgtcatttcgccatcgaatggcccactcgatttatccgggcgatccgcaatataacgatgtcgccaaacctggcggcgatcgttgtggatagtttgcgtcagcccggcggtcgccgggcattgcgatgttcttatccttcgaagaaccagtacccgctattcaccagcgccgccagcatcgcgaggaaggacgggtcttccagcgcatcgccgaagttttcagcggtcagtgcaatatgactggcgagcgcctccagagcggggcgatgcggagagtctattttttcgccattcgcatagacctcatcgccgatacgcaatacgcgaagcccgccgagacgtactaatacctcgccttgctttaaggcatcgtaaatttcatcaggctgatacggcggctccggcggcgcaatatccagttcgtggcgtgactgagagagaaactcgccaagccactgttggaaatgcgcgggttgattgatcaaatcgagcatcatattacgcagtttatccatctcctgcggcaggatatccgccggatgcttgcgggacggcatatccggatcgctgtagtatgtattgcccaactcccgttgcaggacgtaatcggcaaaaccgctgatcagctcacggctattgggcgcgcgaaaaccgaccgaatagttcatggcgttttccagcgcatagccttcatgcgggaatcctggcggaatatacagaatgtcgcccggctccagctcttcatcaataatggcctcgaacggttcgacttgtaacaggtcgggatgtgggcagtgctgacgcatttgcagcttttcgcccacgcgccagcgacggcgaccggttccctggataataaacacatcatactgatccagatgcgggccaacgccgccgccgggaacggaaaaggagatcatcagatcgtcgatacgccagtccggcagagcgcggaacgggcgcatcaacgcggcggtgggttcgtgccagtggtttaccgcctgtaccagcagcgaccagttgctctcacccagatgatcgtagctttcgaaaggaccatggctgacctgccatttgccatcctgatggctaacgagtcggctgtcgatttcgctttccatcgccagccccgccagctcatccggcgagagcggatcgataaagttgctaaacccacgttttaagaccaccgggcgtttttgccagtggcgttcaagaaagtcgggccagttaagagttaattggtattccatgttaagtatccgcaggctggtatctgacaccgattataacggatgcttaacgagatgcgtggaagaacgcacagaaatgtttattcctctttctgtgtgggatgctgtcggccaaaaacgacctccatacgggcgccaccgagcagactgtcgctggcaatgatctgcccggcgtattgttccgtaatctcgcgcgcgacagccagccccacgccttgtcctggtcgtagggtatcggcgcgctgaccgcgatcaaacaccagggaacgtttgctgtggggaatgcctgggccgtcatcttcgacgaaaatatgcaaatgatcgtcggtctggcgagccgaaatctcgacaaactccagacaatatttacaagcgttgtccagtacgttgcccatcacttcgacaaagtcgttttgctcgccgacaaaactgatttctggtgaaatatccatactgatattcacccctttacgctgataaactttatttagcgcagaaatcaggttatctaacaacggcgcgacgggatgcagttcgcggcttaacaacacgccgctaccgcgcatactggcgcgatgcagataatagccgatctgctgggaaatccggctgatctgttccagcatcaccggttcagctttgctgacgctcatcttttcgttgcgtaaagagcgtaacgtactctgcaaaaccgcgagcggcgtttttaaactgtgcgtcaggtcggtcagggtcgtgcggtatttgttataacgttcacgctcgcttttgagcagttgattaaggttgcgcacaaggctggtcagctcacgcgtcgtctccggattgagcatttcgcggtgatgatcttcaagctcgcggacttcccgcgccagcgcctcgatagggcgtaagctccaccaggcggcgatccacagtaaaggaatgactaacagtaaattggcggccagcacgtatacgaaccagctccacaccatataggagcgttttagttctatcggaatggtatcgaccaccacgatggttaactgcggcatccgcgccgtggcaggataaatatttaccgctaccgagtgggtcatctcggcatcatcgtcatcttcacgtacttctttgagtttttcctgcgcggaatggtcttcgctcaacagcgtgctggtggcgtctacgttggtttcaatttcatggaagccgttcgtttttaaccattccggttgaatgcttttaatcagccagggaatgttgcgctgcgtccataataatttgcccgtttcatcgtaaatcagcgtcatggtcgggctttgcatgtccagattttcaggcagctcaacgctgattttattattttcccatttggcgagggtataaaacaggttgctttcgccgcgcagcaaacgaaaggtggttttatcaaaacttacgctatagccgaccagcgccactatgccatatgccaaagaaagcaccagcacgacgccggctgtcgccagcaaaaaacgaacccgcagcgacagcggcagaaaatggcgagcaaatttattcattagcgcaattcaaaaagatatccttgtccgcgtacggtggtaatgacatcgtgcggatactgggcctgtatttttttccgcagacgccccatgagaacatcaatggtatgactttcccgcagttccgcatccggatacagctgaagcatcagcgaatctttgctgaccactttaccgttgttacggataagcgtttccataatggtgtattcgaacgccgtgagtttgatgacctcttcattgacggataattcccggcgtgagagatccacctggaacggcgggatgttgatcacctgggaggccagaccgctattacggcgcattaacgcctgcatacgcgccattacctcttcgatgtggaatggcttcgtcacgtagtcatcggccccggagctgagaacctcgactttatcctgccagccttcgcgcgcggttaacaccagaaccggcagtgaaacatcactgctgcgccagcggcgtattaaggaaaggccgtcttcatccggcagacctaaatcgacaatagcgatatccggaaggtgttcattaaggtagtaatcagcttccctggcatcttctgcggcatcgacctggtgacctgaatcctggagctgaaccttcaggtggtggcgtaataatgcattatcctctacaaccagtacgcgcatcatctcttctcccttgtgttaacaataagaacagtctagcgttgattatggtgctttggggataaacagttaataaaccagacaaatagtcaccctctttctgaagaaaagagggtgaggcaggcattatttaagttcgtcgaccagagtcacagcgcgaccgatataatttgccggcgtcatggctttaaggcgcgttttttctgcttccggcagggccagactatcaataaactgtttcattccttcggcatcaacacgcttgccacgggtcaactctttcagtttttcatatggtttttcaataccatagcggcgcatgacggtctggatcggttcggctaatacttcccagttgtgatccagttcgtcaagcagatgatcgcggtttacttccagcttgctgacgcccttcagggtggactgataagcgataagcgcatagccgatgccgacacccaggttacgcaggacggttgagtcggtcagatcgcgctgccagcgggaaaccggcagtttgtttgccagatggtgcaacactgcgttagacagaccgaggttgccttctgagttttcaaagtcaatggggttaactttatgcggcatggtagaagaaccgatctccccggcgatggttttctgtttgaaatggttcaacgcaatatagccccagacatcgcgatcgaaatcgatcaggatggtgttaaagcgcgcgatacagtcaaacagttccgcaatataatcatgtggttcaatctgggtggtgtaagggttccactggatgcccagcgaggtgacgaactcttcgctgaactgatgccagtcaacttccggataggcggcgatatgcgcgttatagttgcctacggcgccgttgattttaccgaggatctccacctggttgagctggcggaactgacgctccatccgatacgccacgttcgccatctctttacccagagtggaaggtgttgccggctggccgtgggtgcgggagagtagaggaatatcgcgatactgcgtggcgagatctttaaccgcgttaatcacctgacgccagtaaggcaggatcacttcatcgcgcgcggttttgagcattaacgcgtgcgacaggttgttaatgtcctcagaagtgcaggcaaagtggataaattcggaaacgtcatgtagcgccgggatcgcggcgactttttctttcaggaaatactcaactgccttcacatcatggttagtcgtacgctcaatggttttaatgcgcgcggcatcttcttcattgaagtttgccacaagcgtatccaggtaaccgtttgcgtcggcagcaaaagcaggaacttccttgatcgctgcgtgcgcggctaatttctgcagccaacgtacttcgacttgtacacgaaatttcagcaaaccgtattcgctaaaaattccgcgcagcgcgctgactttatcgccgtagcgtccatcgacaggggaaacggcggtcagtgaggataattccatagatcataactccggggttaaatgagcaagaatttgttttgcctgagtcgtcaggcgatgacgagaaaacataagctgtaggcgaccaccgcctacctgatgccagagcacggctgcacggatgcctgccagtagcgaggcgcggactttggcctgcacctgcggactttgcagaacggccggggagcccgtcacctgaatgcgcgggcccaatgggctaatcacatccacgtagatgcccgccatggcgctcattaacgtgtctgactgtaaatcaaaatgatcaagctggcgctgcaggccgttaatgcgatcgcctaacgtattcaatgcgcctttggcggatgacagcttgcgctccagcaccatcaggctaagcgtataacgcgtcagttcggcgttaagtccttgtcggctgctggcattcagcacgccgagcagtgtttccagaccaagacgcaggttggcttcgctgccgccgaacacgcccagagtagaactgggattcatatcaatgacactgttgagtgaaacgtgcaacgcgtcggcatcacagtgtccctggtgcgccagttgttgcaccaggcgtgccgactggcaaatgccagacagcgcgagggtgatgtcataataattctttgccacaatcactgcttccttgtatcaaataaaatacacttcatcttttaagccgctttgaggcgacttgaatggtgttgtgtattgaataatcagaccgtcagcggcagtcgctgctcgataatgccgccgcccaggcagacttcgccgctgtaaaagacagcggactggcccggcgtaacggcggcaaccggctcgtcaaaaatgacctcgatacgatcgtcattcagcgcgttaatcgtgcacggaatatcggtctggcggtagcgggtttttaccgtacagcgcagggtgccggtgaacggttcgcgatcgacccaatgtagctgctgggcgatgaggcctaccgacatcaggcgtgggtgctcatgcccctgggcgacaattaacacattgttttcaacgtctttatccaccacataccaggggtcttcgctaccgtctttggtgccgccgattcccagccctttacgctgaccgagcgtatgatacatcagaccctgatgctcgccgatttcatcgccgtcaacggtaatgattttccccggctgcgcaggcagatagcgccctaaaaagtcgcggaatttgcgctcgccgataaagcagataccggtagaatcttttttctttgcggttaccagccccagatcttcggcgattttacgcacctgcggtttttccagctcgccaaccgggaacagactttgcgcaatctgctcatggccaagcgtatagaggaagtagctctgatctttgttaccgtcgagcccgcgcaacaaccggcttttgccgtttacatccgcgcgacggacgtagtgaccggtggcgatatagtcggcgcctaaatcttctgcggcaaattcaaggaaggctttaaatttgatctctttattgcacagaatatccggattcggcgtacggcccgctttgtactcttcaaggaacagttcaaagacgttatcccaatattctgcggcaaaattaacggtatgcagttcaatgccaagcttgtcgcacacggcctgcgcgtcagccagatcggctgccgcggtacagtattcctcaccatcgtcctcttcccagttcttcatgaacaggccttctacctgataaccctgttgttgcaacagccaggcggaaacggaggaatcgacaccgccggacatgccgacgatcactttttttgggctttctgacattggaatactcgcgacattgaacttcaaggcggcgtattctatcacgcagccctttacttgacaccctctgtaaacggccagttaaattcgcccactatagataaggggtaacgttgtcccgtttgataactgcgaacgctttcagccaccagcggagaacgtaaattcggcgcgttcagaatctcgtcggcgctcacccaacggcagcaatcgatgtcattgtcatgggggtcggtcgcgcaaatatgatcaagcttgatagcgaataaaaagcgcaggaacggggttttatccggcgcaatccactgatgcatacggataaaatactgtggttgcgccgtgatgccagtctcttcccacagttcacgcgcggcggcctgcgccagcgtttcatctgcctccaggtgtccggcaggttgattccataacgatttaccgttgatggtctcttctaccaccagaaatttatcttcggcatgtacgatgcaggcaacggtcacgtgcggcttgaacataggcatccttattaaagcggtttatcaatgtggtcatagatcacgtcaagctgtttcagacgctcgttataagcttttgtcaggcaggtgacgtcggccttgcactgctgacgctgtttaagccagctctgctgggcgtcctgcagggcgccgcgactgcccatcgcgaacaaccctttcagaaactgatatttggtgtgcatttccacgtctttatcattcagcgtcaggtgcgcgcagatagccttttcatccgcagcctgcgctttctggcagtcgaagctggccgcattaacggataacggtgttaataaagcaaaagcaatgagaagccgtttcatctgtctttctcctgtgcgatctcgcgccactgtccattatcgaggccgttgagcgtgtagtcgcccatgctgtaacgaattaatcgtagagtgggatgaccgacatgcgctgtcatgcgtcttacctggcggttgcggccttcatataaggtgacttttagccaactggtgggaatattcttccgttcgcgaatcggcggggtgcgcggccacagccagtcaggctccgcgacaatctcaataccggcgggcagggtagggccatcgttgagcgtgacgccagtacgaagcgcctgcagcgctgcattatccggtataccttctacctgaacatagtaaatcttgccggtgcgtttgcccggttgcgtgaggcgcgcctgcagcgcgccgtcattagtcagcaccaaaagcccttcgctgtcgcggtccaggcggcctgcggcataaacgccttgcacaggaataaaatcttttaacgtgcggcgacctgcttcatccgtgaactgcggcaacacatcgtaaggtttattgaacaaaaccacgcgttttggctggttttctttccgtgatttagatgcttgtcgtgagctgaatcgcttaacgtagtgatttctaaaagaagttttttgcatggtgttttcagaacttattaattgccgcattatagcgcaataatgagtgtctttcatggcggcaaacaatagggtagtattgacatgctcattacaaaacattaacaaaaaattgctctaacgcagtcgtgcagcaggacgccattgcacatgcagcgcgatgacagacgagcaaaccagaagcgctcgaaggagaggtgaatggaaagcaaagtagttgttccggtggaaggtaagaagatcaccctgcaaaacggcaaactcaacgttcctgagaatccgattatcccgtttattgaaggcgatggtatcggtgttgatgtcactccagccatgcttaaagtagtcgatgccgccgtcgagaaagcctataaaggcgagcgtaaaatttcctggatggaaatttacaccggagaaaaatccacacaggtttacggccaggatgtctggcttcccgctgaaacccttgatttaattcgtgactaccgcgtagcgattaaaggtccattgaccacgccggttggcggcggtatccgctctctgaacgttgccctgcgtcaggagcttgacctgtacgtttgtctgcgtcccgttcgttactatcagggcacgccaagtccggtgaaacatccggagctgaccgatatggtcatcttccgtgaaaactctgaagacatctacgccggaattgaatggaaagctgactctgcagacgctgagaaagtgatcaagttcctgcgcgaagagatgggcgtgaagaaaattcgcttcccggagcactgcggtatcggtatcaaaccgtgttctgaagaaggcactaaacgtctggttcgcgcggcgattgaatacgctattaccaacgatcgcgattccgtcacgctggtacataaaggcaatatcatgaagttcaccgaaggcgcgtttaaagactggggctaccagttggcgcgcgacgagttcggcggtgagcttattgacggcggtccgtggctgaaaattaagaacccgaacacgggtaaagagatcgtggttaaagacgttatcgccgatgcgttcctgcaacaaatcctgttgcgtccggcggaatacgacgttatcgcctgtatgaacctgaacggtgactatatttccgatgccctggcggctcaggttggcggtatcggtattgcaccgggtgcgaatatcggcgacgaatgcgcgttgtttgaagcgactcacgggactgcgccgaaatatgcgggccaggataaagtcaacccaggctccattattctgtctgcggagatgatgctgcgccacatgcagtggttcgaagccgcagacctgattgttaaaggtatggaaggcgcgattgccgcgaagaccgtgacctatgactttgaacgcctgatggaaggcgctaagctgctgaaatgtagtgagtttggtgacgcgattatcgcgaatatgtaataacgataattgttaaaaacaaaaacggggacttaacgtccccgtttttattattagtattcgaacggttatcaaaactttatcaaaactccctcaattcagaccgcaatagtagttcatcctttaccccgatcgtcatgataacctgagacccccctgaaagctgatagttaccgattttgattgtagtggttttcttaataatgtgtgatttggctattttttgaaagtgccttaccagatttattgttattatcaggagaattttttaataaaaagtgatggtttattgactacaatagtgggtaggttaagtattttataaaattattagcatgctttatttgctcttctacaaggctgctaagaagtgttgaaatatcagcctgataaagaatacgtcagcgaaagtgaatgctatattagtcataaaaattcaggagacatatgctcaaacctatctgccatagtggaagtataaaggttccggaatatctggaaacagataaggaaaaaaatgccggacgtactccactgtcttcagacattcagcaagttagaaatgttgttgaagatgttccgctatttccagaaagcagaacggcgagaggttctgtaagcgcagcgtacaggctttcttttgacgaagtgttttgcggtctcagcaatgaagagcgtaaaaaggtgtatggtcgcctttttggaaaacaagtacttgcgcatattcattccaggtgtcagcgcgacgctgacataataagagaaaaagcgctcaggcggataagccgtgagtgtggtgccgaaatagattgcgctctcttactaaataagatggtggatattttacaaaatgcccggctgacaataaattttaatgcagcaaaaattgactttgtctctctcttaaaaaataaagaatatctgaactcttatgcattaggttgcagaccgggagatttacctgcttataatgtcgggcgtgattcagttgaaactaaagcatttgaactggagaagcttgcagattcaccttatgccccatatggtcagacaggcggtttttccgtagcatatactcccaacagtagaacttttagcactacaagcagaccaatttatgctgcactggactttctgaacggtgaaaatggaggtgccagcgcctatgggaaatcattttttgaattaaatgataatgtaaaaacaaactgtacattctcaccttttgatatctacggccacagatttggcctggatacgagtaaattatctacattttggcatatggagaacctgattgcatcctgtcaaaatgatttttttggttataattgctttaagagtttggttaaaatggctaaggacgaaaaatttttagctcattctaattatggtaaaggctatgaagggaattatatagaggctcatattcatggtgatgtatgtttattcagagatataaaacacgtttatttgtctttgcaagaaaactcttactcgaaaagtcaactatatgattatgcaaaacaaataaaccaggcgcttaatagagactgcataatattatattgacaagcttattatcagtctctttaaaagagctttaaatgatcatgagcgcatacttcttgaggtaggcagtaactgcttttatatttattatctcaggaccgttctggcagatacctgtgtggcactttagtgtggtctggcaaaatagaggaatatggaccagcagaagcgcctgctggctgcttttcacttaaaatgctggacttcaccggtgcttcagatgaagcgaccttcacagtcatcaagtggcctgtattaccacaggagtgatttactggctatcgatattcctgctcatatcaatgacagtatttcgctctttcccgtacattgctctcccgaccagctcacggtccagtacatgacagtccttttccacttcgctacgcctaattttttttagttgctctgttttattgcgctgaatttgtacctcaaaacaataattttaaatacttatttgaatattttttttatgattttttcaagaaatgagtaaaaaaaatgaagaatgatataaataattaatgcaataaaaaatgatatcacaccaattgatggtcctgttttgtatacgaataacatgcataaaaatatagcaaatagatcaagggaaatatccgcgatgaaatcagtaattattttgaaaaaattcttcatattacctctttaaaatatctattttattcatcatttttaggtcgggcagtgctcgaaattcttacgtacaacgtatacgctccggtttctgcgcgctgcccggcttcacactggctccaacaagtacgcccgctggaatagattcctggcgtcacataacttcacctggttatccacaaaagactcaataaataaacatcttgagtacgaaaaattacagtgtcagagaatgaaatagcgattcgctgtcttcaagcagtgccttagtacctggcacgcgctctttcgcgctataatttttatcaatgtttgtatcgcctgctattttttaaatgtctgctgtatttcgttcatctttccagctgcttttttacgctgactttcaatgtcttttctcgattgttcaacaagttgctgtgctttttcggcttctttttttgggtcgaaaggttctttgatctcatatccggcaatagaaccatccttatttaaggtcattaccgcacgtgctgtatttttagcagtgatggtaatgtcatagacgaattcgccattatgagctatctctgctcgtacaacgatatcgctatcttccgtaacggaaatgatgccactggcgttagcgcgtttaattgtttcctgaatacgctctggtataatgctgaaattgatcgagtcgaatttgaataaagcctcttttagtgcttcttgtttttgctcctctgttatagtgccaaagatggttaaattgacaggcgaaggtcccccccagtagccgttgttaaatttaaacacctctactttagcaggggtgttaacgctttgtcgaatgaatgaatacccgcccttgaagaaacggacttcaataatcgcaagattggctccaccttttgcgttgatattggcaatagctttttgcatttcggctttgtcgtaaaagaacattgattgctggtgctctttttgctggattttttgcatgtatttctcttgatttttttcagcttccgccatggcatctttatcgttatcacaggcgctaattagagttgccgcgatgaaggtaatcggaagtaagagatttttatatgtaacatgtattttattcatgtgaagtatttccctttttatataaaatagatagtcttgactggtcgagactatcctggaaacatagtaataatgcgtgtgcatatctgcagtaagttttagttatgctggttttatttcggatttttacctgttactttttgttcgtaaataggtattttacgtattgatgataagtttagaacctatcccagtaggcgtaatcgttaaagccagtttggcgaataaaagagtctaatgggataggctcttaataaacaacaaaaccaaacgtactttcagatttcaggctggaatgcgcacagctgattgttgataagggctactcataccgacaggccagtgaagcgatgaatgtcggttccacataccggtctgaggtatcaacaacaacatgttctgagtggtagcgtttgcgttatatcgtcacagacagcgcctcagggcgctgttttcgatcggacatgtcgctttcgcaggaggggacgttattcggcgaccagccacatatcagcctcttcaaacatctcttccagcatacggtgcagccgttctttctcggtttttgtacagtcactgtttaatgcgttcgcctgcattggcttaactttcacttgcgcatcgggaaaaagttgatgtacgcgttttgtgagttcattgaggatgatttcgcgtgcgcctggcaaaccttcaacatttcgcttgtcataaacgagttcgacgaacatcgccatttcctttttactggttggatgaccagtatttaagctgggtatataactggtgtcaaggtttagccgccgttttgtcatcctgacgttgcggacgtaaagtaaattgatcgcacgtggaagtaaaggtcgctaacctgttgtcgtgtcaagaggttagcggcactctcttcacagcggtgtcctgctacctgatggtaaattccagggcgcgactaaaatcgcaatcggccaacacaacagggtcgccttttctgacaataatgctatttgtgcccaggcattttcggctctgtttccccttaattttgttatcatcagtgagccagcgctggttatcattacccgtgcatgaataaagaatgattggtgtgccttcttttgtaccttgtcctgcggcatccagacatttctcaccctgcgtgattctgtctcggtgaaatgagaaaagctgagattgcacatgcttacactcccgcagcgtcaaacgattctgttgatctgggcctgcatcaaggcacagaccatcagttgtccgaatttgttccgcgtcatttatgtaataaccaccggaattaatctggttttgtgtaatgaccgggaacgacaaattaatactataaggtgtgggtaagccgttcgtcgtacatccacataaaatagaggagaggcagagaaccagtgtggtttttcctgaaagcaaagtcattcaattattaccctaaaaataaatagcgttacaactatattggcgatttatacccactgaatatgacgtagcattgagcggcaatagagataattccgatagaatcacataaatacttcggttaaatgcgcgcagccagccactcctgtgacaatgggtatatagcgttaaatacttttgcaatattagatgctatcacagtgaaaaacggctgtacatttcttcacgttaaacaaagtgagaagggggggcacccgatatatgataaaagaggtcacaggagtcattagcaaaataaatcttttagattttcgccactgaaaacattctgcagcctttcaggcaaagcctcatagcaggctgcggaggtagacgtactcgctaaatttttctgaaaaaatgccgggtgacgaattatgaaagataaacgttggcggcggtaggtccgcggaggccattaatacgacaaaactcaacgcgtataccggggataagcgcttctgtttcgtgttggcgacatgctgaaatgtggacctgaacatctttgcgtccatcggagggggtgatgagacctttaccgctcttacaatcaaaggttttgacaattcctgtcattttacgagacaaacaaattccttaatggggataacgaggcgcactatacacgtcaggaaaaataatgccagctatatttgatggcaatcaagatttccgggtggctaaaagtagtcgttcggcaccattgtagataaataacattatgttctggagaaagtattccctttcctggcgtcattgactggtgcggacatcatgggttttgtcgtcgggcaggacggtgaactaatctgcctggcttgctttttatcagtatttgtaggtggttgcggggttttactaccaaaatcgtagataaaaatatcccatgatgcctgttgtaaaccagaacaatggcctgaactggccaaaacatggaatgaaaaaataagtaatgaccaaagcataaaagcatgatgtttcatagcacctcctgttatatataatgacttgtgaagttcatctcctgaattatggaacgtcattgacattttttattcaacgaagagttaaccactcttaataataatgggttttatagcgaaatagacttttttatcgcgtgttcaatatttgcgttagttattatttttttggaatgtaaattctctctaaacacaggtgatatttatgttggaattgtggtgttgattctattcttataatataacaagaaatgttgtaactgatagatatattaaaagattaaatcggagcgggaataaagcgtgctaagcatcatcgtgaatatgattacagcgcctgcgatggcatataaccgtattgcggatggagcgtcacgtgaggactgtgaagcacaatgcgatatgttctgattatatggcgagtttgcttaatgacatgtttttagccgaacggtgtcaagtttcttaatgtggttgtgagattttctctttaaatatcaaaatgttgcatgggtgatttgttgttctatagtggctaaacactttatggtttctgttaaatatatatgcgtgagaaaaattagcattcaaatctataaaagttagatgacattgtagaaccggttacctaaatgagcgatagagtgcttcggtagtaaaaatatctttcaggaagtaaacacatcaggagcgatagcggtgaattattcgtggttttgtcgattcggcatagtggcgataactgaatgccggatcggtactgcaggtgtttaaacacaccgtaaataataagtagtattaaggagttgttatgaaaaatattattttatccactttagttattactacaagcgttttggttgtaaatgttgcacaggccgatactaacgccttttccgtggggtatgcacaaagtaaagttcaggatttcaaaaatatccgaggggtaaatgtgaaataccgttatgaggatgactctccggtaagttttatttcctcgctaagttacttatatggagacagacaggcttccgggtctgttgagcctgaaggtattcattaccatgacaagtttgaggtgaagtacggttctttaatggttgggccagcctatcgattgtctgacaatttttcgttatacgcgctggcgggtgtcggcacggtaaaggcgacatttaaagaacattccactcaggatggcgattctttttctaacaaaatttcctcaaggaaaacgggatttgcctggggcgcgggtgtacagatgaatccgctggagaatatcgtcgtcgatgttgggtatgaaggaagcaacatctcctctacaaaaataaacggcttcaacgtcggggttggataccgtttctgaaaagcataagctatgcggaaggttcgccttccgcaccgccagtcaataaaacagggcttctttaccagtgacacgtacctgcctgtcttttctctcttcgtcatactctcttcgtcatagtgacgctgtacataacatctcactagcataagcacagataaaggattgtggtaagcaatcaaggttgctcaggtaggtgataagcaggaaggaaaatctggtgtaaataacgccagatctcacaagattcactctgaaaaattttcctggaattaatcacaatgtcatcaagattttgtgaccgccttcgcatattgtacctgccgctgaacgactactgaaaagtagcaaggtatgtattttatccaggagagcaccttttttgcgcctggcagaagtccccagccgccactagctcagctggatagagcatcaacctcctaagttgatggtgcgaggttcgaggcctcggtggcggtccaatgtggttatcgtataatgttattacctcagtgtaaggctgatgatgtgggttcgactcccactgaccacttcagttttgaataagtattgtctcgcaaccctgttacagaataatttcatttattacgtgacaagatagtcatttataaaaaatgcacaaaaatgttattgtcttttattacttgtgagttgtagatttttcttatgcggtgaatccccctttgcggcggggcgtccagtcaaatagttaatgttcctcgcgaaccatattgactgtggtatggttcaccgggaggcacccggcaccgcaattttttataaaatgaaattcacaccctatggttcagagcggtgtctttttacatcaggtgggcaagcataatgcaggttaacttgaaagatacgatcaatagcagaaaccagtgatttcgtttatggcctggggatttaaccgcgccagagcgtatgcaagaccctggcgcggttggccggtgatcgttcaatagtgcgaatatgaatggttaccagccgctgcgaattctacctgggtcacttaataaagcaaaacatttaaacgctcaacaacgacaattcagacagttcgaacttttctttaaaaataggattaaccatgcttaaaagtggttactaattagccattatactacggtagtgattcacatattctttaacgttacgttacaggaaggttgaagtggaaatgcctgatgagtcttcaggcatttcttaaggttagttagctaaggaacagttactgagaacaggtttatcatcaccttccaccagttcagccgttttgcctttggtataaagtttataagtataatttttgtctatggcttcgtaatttgctccggaggccattttcattaaccgcatcgggatcatctcgtttacctgactgataatcgcataggcgtttccagcctcggtgttgacgtaaatcacctccataacctggttatcattacaggtgtatatagatttagaaatctcctgcgaagctgctatagaggtggtactggcgctaagcgcagcgagaaagagggtaaatgggatcaatttacgtttcatcattagtatcctttgtgcataaaattgtcgttaattccctgaagaacgggagataaagcggcatcaatacgatgaatgctgtagtattcctgtttactgacgaaaagtgcgccagaaaagcgtattataatttatccatcactgacatatgtgatgagtagacaaatcttaaaatcataaactataggctgcaaatcattatggtgcgatagaaaatgattgtcaccactgctcaatactatggcataaaaaccgaagaaaacggtactgttcactgtctcgtttcatacggtatctgtcagtgaaactatttcttcaaatgatggtctttttattatcgatcagataatggcatcaacaggggttattcaggagtatatgtgaaaaagtggcttataggagggatattgatcgcaagttttctgaccggttgtctgatgtggcacaacattgataaatggtttaataaagatatcgaatttttctacgtcggagacgatagctaaaattccagtcagttggcaacgggtgtcatatcttcaggtatggcgcccggagccgccgggcgcaaattgtaggtgtataaaagtcatttcattaaaattttagcgacaacatggacagtcactaccgcgtgctaacggccctctgaagtcacaagatgaataagccagttttttgtttcagcggtgactgaaacatattttgttcctggtggtcttaccgccagttgctgaaaaagacaacgataatgtaactgttgcagagactgacgaatacgacgaccgtgaattttatttttggcgaccatatttcctcccaaaaggccgcccgaaggcggcgctgggtttgataatggagaagggcgttggtcactgccataaccaacctgtatacattaatgcaattgataatcattatcaatttggctggtggagaaaaattgtaaagatgaagggacagcggaaatggcaatgaacgggatgagactttcgttaaccacttaaattcgtgactaaaaaaaggcttttatagacttgaaaatgtttttcccgtccctatgtagtcagtggacaagcaatgcttgccttgatgttgaacttttgaatagtgattcaggaggttaatgatggcactcagaaccttgtcagcacttcccgtgtttgctgattctcttttctctgaccgtttcaaccgtattgatagacttttcagtcaattaacaggagatacgccagtcgctgcgacgccagcttacgatctgcaaaagcgcgatgcgaataactatctgcttaccgtgagcgttcctggctggaaagaggaagagcttgaaattgaaacggttggcggcaacctgaatattacgggtaaacacactgaagagacggtagaggatcagacgcactggatttatcgtggtattcgtaaggcggatttccagttgagtttttctttgcctgaacatgctaaggtgaataatgcgaaactggaacagggcctcttgttggtcgagatttaccaggagatccctgaaagcgagaaaccgaaaaaaattgccatagaaagcaaaccaaaggcgattgaacacaaatcataatcgcgttaatggaggcccgtttagacgggccttcattgtctgtagcgaaaagtatcccgtcatgcttgtaggcacagatcgctaaatattatagccctgacctctatattatcccgtgccactgacctcgtcgccattggacggcggtaagttggaattatccgcgaggtcagtccaatttttgtccactctcgacattctgcctgttatgggcgcgatatctgaacataaattcgtatagcggttcatcgttttcaccgcgttgatgctatttctgctaacactactttcatacgtaaaaaagctgatgctttttaccttatttaatcgaggcaggtatgaaattagcgctcgtcaatcggcaggtcattttaccggaaagcggaaccgagtccttccagtgccatgcctctacgcttgttcgcttaccgtgcggtacgctcgtggccgcatggttcgcggggttgcgcgaaggaagcgaagatacagccatctggctatctcgctatgaacataatatctggacaacaccgcagcgagtggcggcacgcgagggggaagcgcactggaatccggtgttattttacccgtcggataaattgtggttattttataaagtaggcagcgacgtacacgtgtggaaaacctggtttatcacctccagcgatcgaggatttacctggagtacgccagctccgttggttaacgatgatattttgccgcgcggtcccgtaaaaaataaactcctgctggcatcaaatggcgcctggattgcgccagggtcgattgaaagtcctgaacggtggagggcatttgtggatcgatcctctgacgaaggaaaacactggagtatctcttttgtaccgctggagcctgataacgctatttccgggacaaacgtagcgttgtgggatggtataaaaaaggggaggttgtgggaatgttgtctggaaaacctcctgcgctgggatggcgttattcagcctacgctgtgggagtcttctccggggcatatccatatgttgttacgaagcacacgcggggcaatttttcgcagtgattcaatcgactatggcgctacctggtctgttgcccgcgcgacatctttaccgaataataatagtggtatcgatctggttagtatgcaggacggtacgctgattcttgcgttaaatccggtcaacggcaactggggaaagcgctatccgctttcactgattgcttcccaggataatggcgaatcatggctaccgctactggacctggaaagtgaccacggtgagtattcttatcccgctattattagcgagggcggcatcgtacatatcacctacacgtggaaccggaaaaatatcgtatattgtcgattacaaacggtataaggcgctatcagtcgaaaccgatagcgctggaataataatgccttgcccggcgtgctctctcacgccgggatggccgaaatagtcatgatttaccgggtaacatccttgaaaatgtatcgtctttttgtatgtaatggtgaaacaacgccgctgctgcatgcatggcaatcaggaaatagccgatattggccagcatttcatgaatacgctttatatccgattttagggtgctatctggcgtcaaaaataccggtacagtaaaaccaaaaaagctccagcttttcccgcctgacgccatcatcgcgacgcccagcagcggtaaggcgagaaaagtgagataaagcgcgatatgcattaatttagcggctacgtgctgccagtgaggagggggaggcgtaatgaccggatccgggtatttgtgtttaagatataaccgtaaaaacatcagcgcccagaccagaacgcccatatcatagtgcgtgtctttcataaacaggtaaacgctggagccttttggcgcccacccccgtaactcaatagcagcatatgcgatgcctgtcaggagcagtgttaaccagtgaagcgttatttgcagtcttgagaaatgtgccattattattatcctttattaacaactgcttgtagagtatgcgtaaaatcttaacagaaccttaaagcgggggctgagtcgcaaggaacagacagagatagcggcacgtaaaatgggataaaaagccggcggcatcgccggcttactgttgttattgtcctcttacgacaacacaggttttaccataaaacggatatgagcctgtagtttcataatcaacactcgacactaaagaaatatcgcccgcttttttcgctgaatcaatagatgcgtcgccggtatttacaatacccaataccgtttgcgcacacgctttaccggttttggttgccgggagactcgtggcagtaattggccctttaacatccgtatataagccaatccctgtcggtgatggtcctgtagcacaccccgttaaaagagaaccaataaagataattgaaaaaatgtgttttttatttgtcatgggattagtccattataaattaatagaaaacttaccgtccgaaaatgtccggacagtcatttaaaaagtggtgtatattaaatatgcgatattactctttgcaccctcctgttgatgtcgtacctgacggacaaatatccgttgaagccggatatattccccatgccgtgtttttataacttgtgcatcctgtcagcaatgagaacagtacggctaaaaaaatcatcacgagccctggcggcgttaacatttttcggttggactccatagcatgtcatttcatcgggttgccatatgactggcgttctgctggtaagtttcattaacgcccggttcgtttaatattggtttaggtttaaagccaggaggcgctaattacgataccttcttacgtttcagtactgactaataatgttgagaaaatgaacagcgtcgggtgggaagacgcaatacagaatagaagggaaataagagaataagatggcgttaattaacccggtattcctggcgtcatttcccttgcgttttatccccgtcaaaaacggcctttagctcacgttggcgctcccgacgtttgtgcgtatgatgtttttaaaagatcgtcatactttctgttctgcgtcaattttttcattacaaatgctcgccataatgccgtcctcaggaggtctcccgacgtttatgctgcgccgggagaaacaaaaacaacgcataatctgggacaaattgatgattaaaggcaaactggcgctcgtgacgtgcgcgctgactctggtattcacttcgtcgcttttcgccgcgtcggacacggcagacggtcgtaccctgaagctggccattggccctgagccaacggaaggctttgatcctatgctgggctggagccacggcagctacttattgcttcatgcgccgttgcttaagcaaaacgccgacatgagttggggtaatttactgacggaaaaagtggataccagccccgacggtaaaatctggacgctaaccttaaagcccgggctgaaattctccgatggctcgccattaactgccgaagatgtcgtttttacatacaataaagcggcgaagagcggcggtaaaattgacatgggcaattttagccatgcgcgagcgctggacgcacgccgaattgagatgacgctgagccatccgcagagcacctttgtgaatgtactcgggtcgttagggattgttccggccagccgttatgatgaaaaaacgttcgcccgcgaaccgataggcgccggtccgtaccgactggtcagctttcagccgggtcagcaactgatcgttgaagctaatccctggtatgcgggtaaaaagaatgactttaaccggctggtttttgtctttctggatgaagataatgcttatgccgccgcgcgcagcggacagttgggactggtgcgcattgccccttctatggcggtggccccgcagcaggataatcttaaactctgggtacgcgatagcgttgaaaaccggggcattgtcttcccgatggtgccagccggtaaaaaggatgctaacgattatcctgtcggcaacgatgtgaccgctgatgtcgctatcagacgcgcaattaactatgccattaatcgtaagcaactggcggaacaggtgatggaaggccatgcgatacccgcctatagcgcggtgcagggattaccgtggcaaaatccttcagtgatattcagcgatggcgatattgcaaaagcgcgcgccatcctggaagaggctggctggaaaataaacagtgcgggcgtgcgtgaaaaagcaggtaaagaagcgcgtctgaccttatggtatgccagtggcgacagcacccgacgggatctggccgaggcggtgcgcgccatgttgcagcctttaggcattgtcgtctcgttgcaatcgggaagctgggaaactgtagagcgccatatgcacgctaaccctacgctgtttggctggggaagtctggacccgatggaactcttccatcactacagcgggaaagccgctggtgtggaatattataacccgggctattacagcaaccctgcggtagaagcacatctgaaacaggctatagatgcgcctgactggcaaaaggcgattcctttctggcagcaggttgagtgggatggaaagcagggcgcgggcgtccagggcgatgcggcatgggcatggctgcttaatattcagcatacctatctggccaacccctgtattgatctgggaaaaggcgcgccagaaatccacggtagctggtcggtgttaaacaatcttgatgactggacctggacctgtcggtgatgaaattgttcttcagtcattttttgcggctgattattctgttggtgctggtggctgccggcaccttcattttgcttagcttttcgcccgttgatcctatccgtgcttatattggcaacgatctgctccatgttccgccagaacaatatgcgcggattgcggcgcgctgggggcttgaccagccgctgtgggagcgtttcggtcactggttttggcgtctgctccagggcgacatggggtattccatgctgttcaacatgcctgtcgccagtgtgatccgggaacgttttgcgacgtcattcgcgctgctggcaggcgcctggctattgtctggtgtgctgggcgtgacattgggttttctggccggacgttttctccaccgttggccggataagatgatttgccgtatcagctacttattgtcatcgttgcccactttctggatagccatgttgttgctggcgctgtttgccgtccgctggccggtattacctgtttgttgcgcctgggaccccggaaataatgcaggaacagctcttttatcggaacgtttacgccatcttgtgttgccggtatgtgcgttaagtctgttgggcatggggcaaattgcgctgcatacgcgagaaaaaatagccagtgtaatgaagagcgaatttattcgttttgcgcgcgctcagggggataaaggatggtcgctgttacgtcaccaggtgttacgtcatgcgattaccccagcactctgtttacagtttgcttctctgggcgaactgatggggggagcgttactggcagaaaaagtctttgcgtatccggggctgggacaggccactatcgatgccggcctgcgtggcgatgtcccgctactcatggggatcgttttattctgtacactattagtgtttgccggaaatacgatttcagcctggcttgtggtggtgcttaatcgatcgctggagcgtcccgatgctctataatcctgccccgacgttgtttcgtctgctcctctccgttacctgtctgctgtttattgccggatacggttatgccacgttgagccagccgccagaggttaatctgcttgcccggcatctgtcgcctgatatccagcactggtttggcaccgataatctggggcgtgatgtatggcttcgttgctttcagggggccttcaccagtttacaaattggcgttggcgccgcgctgtgcagcggcgttatcgcgttagtgatggcggcagtggcgcgcattcatccccggctggacctcctggtgcggctgataaccgatgctatgctcgccatgccgcatttacttttgctgatccttatctgttttacgctcggcggcggtaaaagcggcgtcattgcggccgtggcgttaacgcactggccccgtctggcgctgattctgcgcgccgacgcggagcgggtagcgcagagtgactacctgacattgacctatcgtctggggcatggacacctttattgctggcgatatcactattttccggcgctattgccgcaatggttgacgggaacgttattgatgtttcctcatgcggtattgcacagcgcggcgttaagttttctggggtttgggctggcgccgcatgagccttcgctggggctgttgctggcggatgcgttacggtttattagccatggaaactggtggctggtgctatttcccggcctaatgttattcacgctggtgatgctcttcgatcagtttgcgcgcgccattcagcggctgtggctaaggagtgacgtatgctgagtttacaacaggttacgctggaaagcgcgcgttatcgctggtatggcgcgagacgctggtcgccgttattacagaatgtctcttttgatatcgcgcccggcgaaatggtggcattggttggcggcagcggggagggcaaaagtctgctgctgcaatgcctgctcgatctgctgccggaaaatttacgctttcggggggagattacgcttgatggcaaccggctggacagacataccatcaggcagcttaggggcaatacgtttagctacgtgccgcagggggtacaggcgcttaatcccatgctgaatatcagaaaacatttgaacagagcatgtcatctgaccggacgcgcctgggatgagacgcaaatggtacagctattacagcaaagcgatcttgaaccgacagtcctggaacgctttccccgccagctctccggtgggatggctaaacgaattctggcgtgccacgcctcgcttagccaggcacgttatatcctcgcggatgagatcaccgcctggcttgataccgcactggcaaaccagttgctcgagcacttgcgaggcctctgcgagcggggatgcggcgtgctgtgggtgactcatgacctgctgctggcggcgcggtatgccgatcgcattgtggcgctgcatcagggttatatcacggacaatatccgctgcgagcagttacagccggaagagatgagtgaaccgttaaaacggcaatggcaagcattgcctgaactaaacccgttatttatgccgaccggagagggaatagaatgctgagctgccgcgacctcgttattcgtcagggcgggaaagtcttatggcagaacctgacgtttacgatttctgccggtgaacgggtaggaattcatgcgccaagcggaacggggaaaacaacgttggggcgcgtcctggccggatggcaaaagccgacggcgggcgacgttctgctggacggcagcccgttacccctgcatcagtattgtccggtacagcttgtcccccagcatcctgaactgacgtttaatccctggcgaagcgccggagacgctgtacgtgatgcctggcagcctgacccggaaacgatgaggcgtttgcatgtgcagcccgagtggctgacgcgtcggccaatgcagctctcaggcggggagttggcgcgtattgcgatactgcgcgcgcttgacccacgaacgcgttttctgattgccgacgaaatgacggcgcaactcgatccgtctattcaaaaagcgatatgggtatacgtgcttgaggtgtgccgcagccgttcattagggatgttggtgattagtcatcagtctgcgctacttgatcaagtctgtacccgccatttacaggtggaatagccgcaagtcgtttctccgcattgccgtgtcgccgttaacgcaccgggaacccatgggttcccggtattgtcggcagagattttactgcatgacgcgtttatctgcgttttttgcatcagcggtattactgtagtccctggtctcttcaacctgtacaggggctctgacaaccagactaggcagcgccagttcgatatcattctcaatgagtttttcaataatacggatatttatctcttgctgaatatccatgtatttattgtaatccgcggtattgacgatatgcaccacctcataggtcagccgatcctgaccaaaggccagtagatgggcgcggtcgaattgtgtttcgccgacatcggtaataatctttttcaccatatcgccgatgaggcgtaacttttccggcggtgtcgcagtggcgacgccaaaagtaaacacgatacgacgcgtttgcatccgcttatagttgtgtatggtttgctgcaacaactgcgcgttcgcacaaacgatctgttcgccgctgaggctacggatgcgagtggttttcaaaccgatatgttcaatcgtaccggctacatcattaaagacgacgaaatcgccgatctcgaagggcttatcgaaaccaatcgatagcgaagcgaagacatcgctcagaacggtttgtaccgccagggcaatagcaataccgcccacgccgaggcttgctaccagtgcggtaatatctacgccgacgttcgccaggatggagagcagcatcatagaccagacgagcacgcgcaaaatcataccaagaatgactaacgtcaccgggtttttattggagcctggggcatacagtaaatgacgcatccatgactgtacgccctgatcaagccaaatcgccatttgaatcgcaaccactaaaaaccaggcgtgagagagggtagagaataaccggtcaggcagggcgacaaagcgcaggctaaagagaaatgcggcaaaaaagattagcatcttactggtctttttcagcatctcgaaaacaataggacgcagccgcccatgagcatcatcctttttatccgggcgttgtagcgctttatagaccacattaagtagccagttgatgagccagtaagtaatgagggtgacgaaaaaaacgaccgccagattgatccagaacgtcgttgacatcagcatcgcaacgatatttagtcgtgctaaatactccattttacctccgatgaaaagcagatgaacattacagtatagacgtcacatcacggaggccgatttccggctttactattgctgttttattcagcacttttgttcaaaaagtatgaaaaagaggggtagccgtttggctatcccggcgtttctgtgcagacttatctactcctcttaataaaataaggagtcatttatgcaacaagaacatcgtgagtgtattgagcagtgttatgaatgcgcggcggcgtgtgatatctgcgcctcttcttgtctgcgtgaagataacgtcgaaatgatgaagcactgcatccagttagatatgcaatgtgcggccatttgtcgcctggcggcgcaatttatggcgttggaaagcgagtactcacaaaaattatgccgcctgtgcgcggatatctgcaaagcctgtgccgaagagtgtgcaaggcacgatcacgaccattgccagaattgcgcgcgggcatgcagccaatgcgcagacgcctgccttaaaatggccgcgtaatttttcttccgccattagctcaaccggatagagcatagagcttctacctctaaggttcggggttcaattcctcgatggcggaccagttgatatcaaaaaaggccacctgcgcggtggccgctgagtttctgttgaaataaatgcaatgttataatataacaatcatctttctaagaaagatgagggtaacgttttggtgattcatttaaaaaaactgacaatgcttctgggaatgctgttggtaaatagtcctgccttcgcgcatggtcatcatgctcatggcgcgccgatgacggaggttgagcaaaaagcggcagcgggcgtgtttgatgacgctaatgtacgcgatcgcgcgctcaccgactgggatggtatgtggcaatccgtctatccttatctggtcagcggcgagctggaccctgtcttcaggcaaaaggcgaagaaagacccggagaaaacgtttgaggatattaaagcgtattatcgcaaaggatacgtgacgaatgttgagacgatcggcattgaaaatggcgttatagaattccatcgcgacaataacgttgcatcctgtaaatacaattatgccggctataaaattctgacttacgcatcgggtaaaaaaggggtgcgctacctgttcgaatgtaaagatgcgaatagcaaagcgcctaaatatgttcagtttagcgatcatatcattgccccgcgcaaatcggcgcacttccatatctttatgggaaatacctcgcagcaggcattgttgcaagagatggaaaactggcctacctattatccttatcagttaaaggcgaatgaggtcgttgacgaaatgctacatcattaagtctgattgcaatgttaaaagctcgctatgaatagcgagctttttttctgccgttatgccatatttctggcaatcaatataaaaaatacctgcgcccccggagcgatgatgacgctgtccataccgccctcgattcaatgccaaacggaagcggcatgtcgcctgattactcgtgtcacaggcgatacgttgcgtgctattcatttatatggttccgctgtcgcgggcggtctgaagccaaacagcgacattgatctgctggtgacaatatgccagccgctgacggaggcccaacgcgcaacgctgatgcaggaattgctggcgctttcatcgccgccgggggcgtcggcagaaaaacgcgctctggaggtcactgtcgtgctttattcgcagctggttccctggtgttttccaccttccagggaaatgcaatttggcgagtggctaagagaggacatttgtcaggggatttatgaaccagcgcagcaggactgggacatggtgttactgataacccaaattctggaaaccagtataccgctaaagggagaacgcgcggaacggctgttcacgccagcccctgcggcgcagttgctgaaggccttgcgttatcccctcgacctttggcaatccacggcagatgtgcagggagatgagtatcatatcgttttaaccctggcgcgtatctggtataccctttctaccgggagatttacctctaaggatgcggcggctgactggctgttacctcagttgccagaagattatgctgccacgttgcgtgcggcgcagcgtgaatatttaggtctggagcaacaggactggcatattttgctgcctgcggtcgtacgctttgtggattttgccaaagcgcacatccccacgcagttcacataagatgccccaggacgtctgtcaggttgcgcaaacggcgttcctcaactactacttaataggttctcatcgctgaagtaagcagatgatcttatgcgggccatcgaatggatattcccacatggctctcgttttgttgaggtggatatgactggttccgcatcatctgttttaaagacagatacaagactattgagcgaaaacctgtttcttaattatggtctggagtccttatttaaggacgtcgcaataatagctggcaacgtaaattatattatttttgatatcgacgattactacaccgtacagcagtatattacttccacatttaaaacggtactcattggaattgttacccataatgaatataactttattgatgaacatcatgtcatatatcgaataaaggtcgatgcctctattgctgagtggcgcgaattactgattttggccgctgctggtcaattttttcccaggtcagagaaagtcagattaacggcgaatgaaagaaatgttttggcgatgcttgttaaaggaatggatatccgacaaataagctgtgagctgaatgtacatttaaaaactatttactcagtacgctaccatgttctgactaaattaggttgtagaacagttctggattatcaaatactgtccgtttctaaagcctttacgcactggcttacaataaataatgttgataatgtaatttcccgtgtaaatagtaaggtcattgcttaataatgatttgcttctgatggcgtttaggttcactatgctttcttacatcatcatgaggccagacaggcatggctacttttagtattagcgcaatggcggcgcagtgtggtgtcacaacagcaaatatcaggtcctgggaacgctatggcctgcttcaacctaccaaagatgaagctggcaatcgtttttattgcatagaagatgctatcagaatacagcatattatcgacgcgttaagcaaaggcttttcattaaaagagattaaacctgccctctatggtgaagaaacgcattgccgctcgggatggttattctaccaggaagagattttagcgcagtgtagaaaattcgaacccgccaaattgcgaaaattactctggcgttatggtcgggaaattccgccgtgtatcgtcattgagtcaatactgcgtcctttacggctgtggttgtccgcaggcgatgatgatgcacgccgatttgaaaaggcattactggatactgcgattattgaatacgccacgttccagctaagtagcgtacgaaaggcgccagcaggcacaatgcttattgctgcgttttcgctgaacgaccccattgagctatggctggaaacgattaaatattgtagtgaaggtatgcgagttgaagtcatcccctggcaggcgccgatgcccgatcttttatcaacgtctttcgagcatattgttctgtggcatgatgagacattaactcccgcgcaggaaaatcttattcaggctttaaaagaatcgggtaaatttagtcttcatgtgaaaaatggctcaggcttaacattactgccagccgtatatcggcagcatgagatgccagaaagcatgcagcatgttgcaccgcaaatccatgcaaacggctacgaaaaatcaggcaccgcacgttgaggcatctgcattattaacgaacaggggaggagtaaacccctcccttgtttatactcttcatacttcaagttgcttatgtgttggctacggattactcggcccatccatgggcctcgccctgacgggccgtcgcacgcgacgttcaaatctgctcccggcagatttgtcgttcaccccagtcatatagttatctatgcttctggggactcactcccttgccgcctttaagcaactcgaattattttgggtatatattagatgtcgtcaggtgtctgaaacaaaacggcttctaaggcattacggtaaatatcaagctgcactacgtctttttctgtttccagtttttcaataagtttggcgatgatatccttatttgagacatgctgctgcgattgcaatagttcgtaagtaatttcctgaatagctcgctgttcacataacatatgtgcagaaaaaggattgccagtactattttgttcgttgactagtgtaatggtagtcatatttcaccatattcgatgtaaattgaagccgatctccctgagcgggggagagaaattagtgacctattaaagttagacctatatcataaaactgtaataaaaaatcataaaaacgtgatgcgcatcacatttgtgtgatttgttgtatattttatacactttaaatgaagattccgcagaatcaacggcctgttcttttttctcactccagtttaaacgaataagcattaatacccatctgtaataattacttaatgttatcttaataaaggtaaattactgtcaggcctccgtaaaaggaggttgattaatgattcgtcatatcgccatttttctttgttctttattgatgtgcagcaccacttttgccgattcggtaacgtcggtatcgcttggcgcgctcttaaccgcgctcaatgaacgcatgttattaatgaaagatgtggctgcttataaaatgaagcaccatctgccgatagaggatttcacacgtgaacaaaatgtttttgccgaggctgaagaagaagcgaaaaataacggtctggacccgcattcgataaccccttttattcgttcgctaatggatgccagtaaagcgatacagtaccgctatttagcgcagtggcgaaccggctcagaaccctcctttccgatacaaaccttgtcggtcacccggcaacgtattcgacaacttgataatcaaatgttgatcattatcagccagcgcttgatggtcggcgctttcagccacgacgatatggtgtggctgagagcgcagtttaatgcgccgaatctgaatgagagcgatatcagtaatgtgttggcagccttatctttggtgcgacgcgcgcgttaactccacatgaggagaggtgggccaatacctggtgattgcctgcggaggtagcgataaaagaacgcttttaggtgatttggatataagcgtggcggaatagcggctggagagacgtggtttcgcttcccatcttccggtgcattcgttagcatactgtttcgcagctaagcgtaaatgttttcaggaagaggttaatgtgttcgcggagtatggtgttctgaattattggacgtacctggttggggcgatttttatcgttctggtaccggggccgaatacgctttttgtgcttaaaaacagcgtgggacgcggggttaaaggaggatatcttgccgcatgcggcgtgtttatcggcgatgcgatattaatgtttctggcgtatgcgggcgtggcgacgctgatcaaaacaacgccggttctgtttaacattgttcgctatctcggcgcgttttatctgctctaccttggcgcaaaaatcctttacgccacgctgacctcaaaagggcgtgcggcgacggaaacggtagttccttttggcgctatttttaagcgtgctttaattcttagcctgacgaatcctaaagccatacttttttatgtttccttttttgtgcaatttattgacgttactgcgccgcatactggggtgtcattttttattttggccaccacccttgaaatcgtcagtttttgctatctgagctttttaattctttctggcgcttttgtaacccactatattggtaccaaaaagaaactggcaaaagtgggcaattctttgattggccttcttttcgtcggatttgccgcccggctggcaacgctccagtcttaaccacctggacccgtcgtcaacggcgggtcattgctctcctttcggttttattgcgtggaaaacagcaaaatagtaaccaataaatggtatttaaaatactgtttttggagcgtaacctttttacgacagcgatgagattatcgctgagtaacctgcgtgaagagggaagcaaatgcggcaaattccacaaaatcatattcatacacgttccacgccattctggaacaaagagacggcgcctgccggaattttcgaacgccaccttgataagggaacgcgacccgacgtttatcctcgtctctcggtgatgcagggggcggtcaaatatctcggatacgctgatgaacattgctctgagccggaagagatcatggtgatcaatgccggcgagtttggcgtgtttcctccggaaaagtggcacaatattgaggtcatgacggatgatacctattttaacatcgacttttttgtcgcgccggaagtactgatggaaggggcgacctcacgaaaagtcattcatgccgggagagaataataatgggaaaagctacttataccgtcacggtcacgaataatagcaacggcgtctctgtggactatgaaacggaagcaccgatgacgttgctggtacctgaagttgcagcagaagttgtgaaggatttggtcaataccgtgcgttcctacgataccgaaaacgaacacgacgtttgcggttggtaaggatcttgtagtatctatttgatataaagtgattttttaaatcagaagccgcatcgcgcgtcgccagcgtgatgcggtttttgcgtattgaaaagcgctgtttatttacatcagacatgggttgaaaagaaacattaagaaaacattaagaatatcgcattgtttgctaatgagagcgtattcataaaacttatgattgggtattaaaaaccagaagagtcttataatcatgaaactcgatacccgattaacttcgtcagcacttactcttgcgcttgccgctgtggtcatcccgtttacggcggactggcaattgcctttgcttaacggcgtggtggtccgatggattgaaaacggacaagcgttatggttactgtttggggcgctatttaccgcctggtatatacggccactttcccgtcccgaaggggcaaagcagttttggctatgggctgttgtctggtgggtggtgctattgggtagaagcaccagttgggggcgtgactatttccctgacgagccgcgtatgctgttcagaacgatttcagtgatattaattgctgcgttagtcttgccagtcctgttttctgccgggctacgtaaggagattgttcgtcgcctacgggacgttcctctgccattgtggctgtttgccgtgacgacatgttcatatctgatttccgacactgtcgagcatcatcggtggttgtcgccgatattcctgcataacgctcgttacacggatttgattgaagagctttatgaagtgccatttatgatcggtttgtttatggtgaccgtggggtttatgcagcaggacaagcaggatgaatgtacggcgctggagatgaccccgtatcacgcaaaatagcgcggctgaaaaaagaccatgaattcgacatgggatagatagcggttagcaaaaaaagcccgcactcggtgaggcgggcaaataatactggaagcaatgtgagcaatgtcgtaccgaacaggtgggttataaactcaaccactcggtattgataaagataatcgttatcattaatgattgcaaccctgatatttatgcgcttttatccacgacgctaaaaggtgatggacatcacaaacttcactttcctgacgatgtgctattctttttaacggcaaataaaccgctaacgttaagacataagtgaggaaaaaatgggcattctttcatggattatttttggacttattgcgggtattttggctaagtggatcatgccaggtaaagatggcggcggattctttatgacgatcattctggggatcgttggtgcggtagtcggaggatggatcagtacgttctttggctttggcaaagtggatggtttcaacttcggcagctttgcagtcgcggtgatcggcgcgattgtcgtgctgttaatctacagaaaaatcaaaagctaaacgcagaactttcagagataataaaggctacgacaggtagcctttattattcaaaatgaatttaccaccagcccagttcggtacccgccaccgcaattagcgcgatgcccatcaacaccatcgttgttttcctcatggttatgctcccggcgcggcgtaaccgccaataaaaaaccatgccaaaaataatattgccgtaatgaaaatgacgacagggaagaggatacccactctcatgctattaccttcactgttcagggggcgccagaatagcagggttttctcagcgacaaaaggttggttgctttgtgacagggcgtggctattgctgacttaacccgggataaacacccactaaagcgctgacagaaagtatggaaatagcgtacccgccaggttatcctggacaaaatatcgctttaaggagtcgttatgaaatttacgtggattgcgttgccaggcgtattgctgctgagcgcttgttcatcgtcgcaacccaacgcccccaggccgccgcgtattgggatgcctaatccggcagccgtctactgtgagcaacagggcggtacgctgatgccggtgcagaccccacaaggcgtgcgttccgattgcaaattgcccaatggcgaaatcattgatgagtggacattatggcgcagagagcaccctgatacgaaaaagtgacaacctgcggtccgacgggatatgattaagaacaatctgataatgagtttcatgcggcgcaagaaaatatgtttcagttaaagccgggcgcgttggcaatagttattggcgctaaaacacccgccggacggcagaatattggtaaatcggttgagctattttgcctgtgccaacccggagatgaattcattaatccagtaaatggacacgtcaccttactgccgaaagaagcgcctcgggcgctgtggctggttacgggcgacgtagcctccgccgatggccagcacggttttgcctgggtgcgggcagaacatttgatgccgttgtccccggacagacaaccaggccaggcggcggcacgacaatcacagctctcgtagccactctgccagcacaatggcatggttctggcgagtatctttagcggcgtatagcaacgttagcggctggtgtcgggcaatatccgccagacgtttgccttcttgatgctgttgcgcaagttctgcccggtattgctgcgcgaagtggttaaaatcaatcagttcgctatgaaaggctttgcgcaattcggtggagggcgtaatggccttattccattcatcatagaccagcgctgcttttttaatgcctcgcggccatagcctgtcaaccaatacccgataaccatcgtctttttccgccgggaaatagacgcgcttacactggattcgcatttttccctcctgtgatggtgtcgcttacggtacttttgtcggatagcggtaatgattttaatggatcaggcctgataaacgaagcgtcatcaggcattcaagtgggtatcaggtttatttatgacgctatctctcgatcgcgtccggcgtagaggccgaaaatcgccatgatgatagccagaaccgtcacgcctgacagcggtagataccagctaccgctggcatcatgaagttttcccatgacgggcggcccacatgccgccagtaaatacccgaccgactgcgccatgccggaaagcgccgccgcctgatgcgccgaactggcgcgcaggccgataaacgtcaggccgaggatcatcgtcgcgcctgaaccgaagccgaacagtagcgtccagatgatcgcctggcccggcacaaaccaaagccccgccgcgcccactgcgcacaatagtgagaccagcgcggcaatccagcgttgatcgttaaagcgatgcaaaataagcggaatagctaacccaggcgccgcggtcgccagttgcagcaggccatgtagcgatcctgcctgtgcttcgctgtaaccgtggctgatgagtattgttggtaaccagccgataatcacataataaatcagtgagttaagtcccagaaacaacgtaacttgccaggctaaaggcgaacgccagataccgcgttcatgtaatgcccgggagctactcaggttagctgagcgggtagtgcgccactgcggcaaccagataagaaacgccaacagcggaaacagcatcagcattaacagcgcgccgcgccagccaaaaccgtgcaacgccagcggaaccaccagcgcggaccccaacgcggcggcggcgcccatcgtcaatgaatacgcgcccgtcagcctggcgacatgttgtgaaaaatcgcgcttaatcaatcctggtagcagcacattacccagcgctatcccgcacccaataatggcagttccggcaaacaacaatgcagcggagggcagggagcggagagcaatacccgcgcaaatcagcagcattgcggcaaacagactgcgttccatcccaaaccggcgggcaataccggccgccagcggcgaaaccagtgcaaacgccagaagcggcaaggttgttagcaggcccgtctgggcggtggaaagaccgtaatccgaacggattgtctccagcaacggcgcagcgccggtaaatgttacgcgcagcgtagtggctatcatcaaaataccggcaatcagtaaagcgccctgtttgccgcgtggtgaaagggctgtcgtcatcgttttctcatctcgtcaggcgaggcgataccttaacagtttttactgtttggatgaatcaagctaaaatgacaatttatcgctaaaatcggacaatataatgattggtctgagactggacggttacgatcccgaccttcaccacgatgccgctgtggccttttgtattcgcgccagggatgatgaactgtttagccctcgccatcagcatcgcaagggacagttgattctcgctctgcacggcgcgattacctgcgaggtggaaaatgcgatgtggatggttccgccccagtatgccgtctggctccccggctcgctgccgcacagtaatcatgtgaccgcaggggcggagctgtgctttttatttattgaacctgcggcggtcgtcatgccggagcgttgctgcacgctgaaaatttcgccgttatgccgggagttgattttgtcgctggcgcgcagaaccgatcccgaaagagcgcaaatgccaacgcagcgccttattcaggtgttgtttgatgaactgccgcagcagccgcaggaacaattgcaattaccggtatcggggcatccgaaaatccgccaaatggttgagacaatggcgcaggagcccgcgcgatggaatacattagggcagtgggccagcgtattcgcgatgagcgagcgtaaccttgcccggctggtcgtcaaagagacgggactaagctttcgtcgctggcgtcatcagttgcaattaatcctggcgctacaagcgctgatcgcgggacgtaatgtacagcagacggcgcaaatgctgggttatgattccaccacggcattcattaccatgtttaaaaaaggcctggggcagacgccaggccagtatctgacgggcgagttactgcttccccacaattaaagagaccagccccgccgcaatcagtgggccgaccggcacgccgcgaaacagcgcgacgccaagtaccgtaccgaccagcagcccggcgacgagctgcggttggtttcccatcagcgtaatgccgcgaccgcccagccaggagacgaaaacgccgacggcaatcgcgaccagcgatttccagttcacaaaagagtggatcaatgtggagggcggtagggttccgctggcgatgggagccattacgccgatggtcagaatgataatcccgacggtgagtccctgtttttcaatccagggaaaaaaggtattcaacggggttacgcggacaataatcagcaccagaattgagacggcgacagtggtgttgtggctgataaatcccagagctgccagtccgagcaggatcagcagagtgacatcaaacattatggtttccttgccaaaaagtaagcctgactactttacgcccaaacggcaaagcgcacaggcctttttaacgattgatgcggatttcaggcaactgcctgaaagacaatctctacgtgaaaaacggcgttgtcattaaattgccatcaacgccgcgtattgctaacaggtgaaccgtcattgttgtcttcctgaggatacaattatgtacgatccaccgtttcttgaagcgctgatgattacggcgtcgtttttcgccatttttatcattatcgttgtgtcggtattgctccttgaagggggaggggactaagccgttggcgatgactgaaagcggcggaagactgccagttctggtcgggcgatgcgcagatagtcctgtgtattcataatgactgatttttccagcaggccggcattaaaggcaatttcatcgaaacgctcaaacaggagcggatcggcgaccagtttcagattggggtgaaaactgaaaggcgggatcgcgccaaaaacgcagccggtcagcatatcgacttccgccgggctggcaagggaagcgcgtaagccgcccagatgtgaagcaagctgagagaggtcggcttgctgatcggccgccagaatagcaagaacgtgctggttgacgccgttgcctttgactttacagaccagcgcttttgcgccctggcccagcgcagtaccacgtatttcagataccgcttcgcatttccctaccgcttcatggttcaccacacgatagcgcgcgttctcctgggttaataaagccactaaacgttggtgtgtagcgacacccttcgcgacttcagtcatttcggccatttctcactcctggtgcaatatgaacatttactgcgaagcactatgatgaacgatgttgtttttgttgtttgttcagatagagctgcgcatcggaagcctggtaggcatcattaatcgtatcattgggctgcatattataaatcccggcagaaaaatggactgtcttatccggtgcgataatttgcaggttacgaataatacgctccggcagatggatagccaaatccgccgcgtaatcaacaagaataatacagaactcatcgccgccgaggcgaatggcgtaatcgcttttacgaatcgatgttttaatcgctttcgccaacagggttataattcggtcgccttcctggtgcccctgggtatcgttgatcagttttaacctatcgcaatcaatagcgacaaatgtcaccggcgtcccggtattgaccaggcgttgcagtcgctgttccagcaccggtgttaatattttacggttgtaaagcccggtcatggcatcgctaatattttcgcgtgtgacgttgcgataaagccgaaagtgcatccgtaccatattaagcaggagcgccgttgccagtaagtaaaaggccagcgctttccaggacgagacaaggaaataggttaaatcaagggacaacgaaacgcgcagcccaccagggatatcatggctataattcacatattgaaacagattatttttgctttgattaataataatttcttttccggagtccatatcctttagtgttacgttaagataacgccaaaccagcggacggtcctgggtataaaaaatattttttaaattatcctggttaacatccaccatcacgatgccttttaacgatcccgccagatagactggcgttaaaaaactcatgacgttttcctgagtaatatcatccatgtagatacttgaaataaccgtacggccggtaaaaagtttatctatatcttttctgttaatacccattgtgcctttttgtaaaaaagtccaacgatgcatggcgaagcgccgtgagttgattaaatcatagaaatagacataatgtttatttaaatcaacgtaataacggaatttaagctccagtgtgcccagcccgtgactatggtcgtcctgcgaacggttgatgcttaccgcctgatcaaatgcaggcagtaaaagggcgtcatcaagattatcggtacactgtgtagcggcggtttgcagagtaccatgtagcgccggataattatgccgggtcaggttgacaccgtgcgtaccgttaatagcttcaaaggcgtcgcaaaacgcgcggtgtttttctgcggtgacggggtctcccggcgcttcaaaagttcgcatcaaatgtgcggcgatgctctgattctggtacttatcgtacaaaaacgacgaatcggctctctccatgatataacgcatataggcattcattgccctgtcgctggcaataagttcgtaaatcaggaaggacgatgtcaaaacgatgacgcttgccgagataaagtgcctgagcgctttatgatgcaaattcatgatgaactacagccctgaaagtcggatgcgttagtttaccatagcgatgagaattcctctaatagactgtttaaaaataaaacgtgttgatgttatggaataaaaatcattctcgatttaataaattcaataatatatggtgttgatattttcagtcgtgactattgtcgcaaaaagtaaattgttaattaacggcatcgatttaacactaacgaaaataaaatagcctttattattacgcgaaaggagtgtgaagtggtaaggataataatgtacttccgttcggaggcactatgaaacgatttaaagaaatggcaacaatttttctttttgcattgctggctgcggggttcacgtcgtctgctatggcagcgtcgggtagtgatagtccgtgggattttgatttttcgggtccatggcttttttgcaaactacaaccccctgattctctgcaattaccgccacctcctggtgagtattgctggcattaataaatccatagtatttcagtgataagtcggcgcatgtaaggttaatccagtcaggagatatacaggtttacggctattatagtggtagtatgtataattgccttgttagtgataaatcagcccgtgactcattacgggctgatttatggttatgcactttgattggcgctctgtttctgaaacaattcgcggaataccggataaatatcctcctgatcgcgaatatgctgcatggcgaagttatcgaacgtcgcctgcagatgttcatactcgcgccataaggtctggtgggcgcggcgggtaatctcgatatagctgtaatagcgcactaccggcagcagctttttcgccagaatctcatgacacagcggtgaatcgtcggcccagttatcaccgtctgacgcttgcgccgcatagatgttccactgaccggggtcgtagcgctctttaaccacttcgtccatgagtttaagcgcgctggagacaatcgtcccgccggtctcttgcgaataaaagaactcatgttcgtccacttccttcgcctgggtatggtggcggatataaaccacttcgacgttcttatacgttcggctcaaaaacagatagagcagaatgtaaaaacgcttggccatatctttggttgcctggtccatcgaacccgagacgtccatcagacagaacatcaccgcctggctggagggctcaggccgtttttcataatttttatagcgtaaatcaaaggtgtcgataaacggcactcgctcgattttagcccgtagttcggcaatctcccgacgtaaccgctcctcttcaagcagttgcgctggttcgctgtggctgatggtctccagttccgtttccagcgcgtgcagttcgcggcgttttcctgccgtcattgctgtacggcgcgccagagagttttgtagcgaacgtaccacgctgatattggccggtacgccgtttgaggtgaaaccggcgcggtgagttttatactcgttaagctggcgatgctggtttttcttcagattaggcagcgctaaatcttcaaagagcagatccagatactcatcttttgaaatctgaaaaacaaactcatcctggccttcgccgtcctggctggcctgaccttgaccgctgccggaaccgccgccgccaccgccttgcggacgctcaatgcgatcattctggataaagtgatcgttacccggatggacgcgatggcgcagaccgccgcgcccctgatgaaacatcggttcgctaatatcatcggttggaatagagacggactctccgctgtcgacatcggtcacagagcgtttattaatcgcttcggaaatcgactgcttaatttgtgctttataacgacgcaaaaagcgctggcgattcaccgtgcttttatttttgccgttaagacgtcggtctatgaaccaggtcatatgccccccgtactgccaactgagcgcctgttctgtcagtgccggatagcgctaacgcttagccagtctacagaacattactttgtaggcccggtaagcgcaagcgccaccgggcattaacatcacgacgatttacgcacgcgcaggtaccactcgcacagcaaacgaacctgtttacgggtataccctttttccatcatccgatcgacaaagtcgtcatgctttttctgctcgtcagtcgacgttttggcgttaaaagaaatgaccggcaacagctcttcagtattggagaacatttttttctcaatcaccgtgcgcagcttctcgtaactggtccagtttggattacggccgctattgttggctctggcgcgcaggacaaagtttactatctcattacggaaatctttcgggttactgatacccgctggtttttcaattttttccagttcggcgttcagcgactcgcgatcgaacagttgaccggtatccgggtcgcgatactcctgatcctgaatccagaaatccgcataagtcacgtaacgatcaaaaatgttctgcccgtactcagagtaagattcgagataggccgtctggatctccttgccgataaattcggcgtatttcgggatcaggtagcctttcaggaactccagataacgctcagcctgctcctgcgggaactgctcgcgctcgatttgttgttccagaacgtagaacagatgtaccgggtttgccgccacttccgcatggtcgaagttgaatacgcgggagaggatcttaaaggcgaatcgggtggagagaccgttcatcccttcatccacgcccgcatagtcgcgatactcctggtacgatttggctttagggtcggtatctttcaggctttcaccgtcataaacgcgcattttcgagtaaatactggaattttccggctctttcaggcgggaaagaatcgagaaacgcgaaagcgtttccaacgtgcccggcgcgcagggcgcatgagccagctcgctatgattaagcagtttctcgtagattttgatctcttcggagattcgcaggcaataaggcaccttcacaatatagacacggtcgaggaacgcttcgttatttttattgttacggaaagtcacccattcagattcgtttgagtgggcaagtatgatgccattaaagggcagggcggaaataccttccgtaccattgtagttaccttcctgggttgcggtcagcaaggggtgcagcaccttaataggcgctttaaacatctcgacgaactccatgatcccctggttagcgcggcacagcgcgccagagtaaccatacgcatccggatcgttctgggcgtgatgttcgagtttacgaatatccaccttgccgaccagcgccgaaatatcctggttgttttcatcgccgggttccgttttggcgatggcaatctgctccagaatggagggccagactttcaccacgcggaatttagtaatatcgccaccaaactcatgcaggcgtttggccgcccacggggacataatcgtaccgagatagcggcgcggaataccgtactctttttccagaatctgcgcgtcttcctgcggattaaacaggcataacggatgatcgttgaccggactacgctcgccgttggcgcttaaaacataaattggcacgcgctgcattagcgatttcagccgttcagcgagcgatgatttgcccccccccacaggtcccagcaaatagagaatttgcttcttctcttccagcccttgcgccgcatgttttagataagagacaatctgttcaatcgcgtcttccatgccgtaaaactcttcaaacgcaggatagcgagcaataacccggttggagaagagtcgggaaagtcggggttcctgggcagtgtcgaccatattaggctcgccgatagccattaatagccgctctgccgcgttggcataagcactgcgatcttgccgacaaatggtaagaaaatcctgcagtgtgaactcttcgtccttggcagcttcgtaacgctggcgatagtgatcgaatatattcatgatatgccatcctttcgttttttcgcacatgttaagagccgttcatatgaatagtagaggctcccggaagaggtagactgaacgccgtctctgctaaggaaaaaaaagcaactctcatgccattttattggtcagaagattaacgtgtccggtgatacaccttcttaacattaagcgtagatggcatttgcaaaacttgcctgtacgcgtcagtggatttcgatgacatatcaataactcatcaggtagaaaaggctggtggatatcagaaaaagcgttcccggtcacataacgatcatcagccgatcatctgaaaataatcggttgtggtgatattaaacggttacattgtgtaaaatagttgggcttacaggtattggcggttacacttttgccgcagaacatttgaataaggaattatggattgtgaccaaacttaaacttctggctcttggcgtgtttattgcaacatccgccagcgtcgcgcacgctgaaagcaacctgacgttgggcgcaggcgttggtgtggttgaacacccttataaagattacgatagcgatgtttatccgataccggtcatcgcttatgaaagcgaaaacttctggttccgtggtctgggcggcgggtactacttgtggaatgacaatgccgataagttgtcaatcatggcatactggtccccgatgtacttcaaaccgggcgacagcgatgaccatcagttgcgtcgtctggacaggcgtaaaagtactatgatggcgggcgtttcttacgcgcatcacacccaatatggattcctgcgtacctcactggcaggggatacgttggataacagtaacggtattgtctgggatctggcctggctgtatcggtataccaatggcgggctgaccttaacgccaggtatcggggttgaatggaatagcgagaaccagaacgattactattacggcgtatcacgtaaagaatcttcgcgtagcggcctgcgcggctataacccgaacgatagctggaacccgtatcttgaacttagcgctaactataatttcgccggtaactggagcgtatatggtactgcgcgctacacccgcctgtcggatgaaattaccgacagcccgatggtggataaatcctggaccggtatcctttctactggcgtgacctatagattctgattgattgaatttgccggaaaaaccacgacaaagcctgcgttatgcgggctttgtgctgtctgaaacgcgaacatgacggcttgcataaatgcgctgttgaccgggtatggcgcagccttatgtgatttatactttgttacatcaatttaaaaaactagccttttatatgaaaaatccaggtgattacaactgcgctaacaattagcgtaataattgttgcaatgctggctgatatcgccctgtcacgtcccgcttatgctatacccattcttcacagcgagtaagacgaatgagcatagtattcaataccgtagccaagcccagcggcagtctgtgtaacttatcctgcaagtactgtttctatcttgataaaccccgggggcagcgcgtcatgtctgacgatgtgctggagacgtatatccgccgggtaattgatgatacgccatcctcagaggtctcgttttgctggcaggggggagagccgacgctatgcggtctttctttttaccaaaaagtggtgcgcttgcagcaacgctatgccaacggcaaaactatctacaacagtctgcaaaccaatggcgtattaatcaatgaagagtgggcggctttctttgcgcagcaccagttcctgattggtatatcgattgatgggccgcaagtcgttcatgataattaccggaaaacgccgtcagggcgggcgtctttttcccgagtcgttaatgctatccgccttctgcaggcaaatgatgtcgagttcaacacgctcactgtcgtgaatgatgcgtcatgctgtcatggcaacgctatttatcattttttgacgcaggaactggaaagtaaacacctgcaatttattcccattgttgagccgctcgcgcaaaaagcgcagcgttctttgacgttatctgacaatgaggattcgccttcgctgatgcccttttccgtcacgcctgaagggtggggcgcctttatgtgcgatgtttttgatcaatggatacgtcacgatgtcggacgcatattcgtacagctttttgataacttacttggcgtctggatgggggagcccgccacgctttgtacgatgcagtcgacctgcggacaaagtttgctggtggagcagaatggcgacgtgtttagctgcgaccattttgtttttcccgcctataaactgggcaatctgcagcaacactctttagaagaaatggcggcctctccttttcagcagcagtttggcgcggctaaagcaaacctttcctcacgctgccagaactgtacgtggcgctttgcctgtcacggcggttgtccgaaacatcgaatttgtatggacggcggcgaacggcaaaattatctctgtaaaggatatctggagttctttcaacatgtgacgccctatatgaatgtgatgcgtcaattattactgaatcagcgacccgccgcgcatattacccgcatcgtcgacatgattgcggatgacgttcgtcagtgacaagaaaatcgcccccttgcgcggtatgatgccggacattaccgtagggtctaagagtcctgtattgttttaccgtcgagtgacattgaaaaggaaatgaaatcagtgaaaaacgtaacgttttgcgggcaggtgacgcttcctgccatcggacagggaacatggtatatgggcgagcgcgcggatcaacgtcagcgcgaggtttcggcgttgcgcgcggggctggatttggggttacgccttattgatacagcggaaatgtatgccgacggcggggcggaaaaggtcgtgggcgaggcgttagcagggcgacgcgatgaggcatttctggtgtcaaaagtgtacccgtggaacgctggcggccagaagatagttgccgcctgtgaagaaagcctgcgtcgtctgaaaacagattatctcgatctctatctattgcactgggccggaagcttttcattcgaagagaccgttgaaggtatggagcggctaatcgcgcaggggaaaattcgccgttggggagtctctaatcttgattatgacgatatgcaggcgctgtggcgcatccctgggggacagcaatgcgcgacaaatcaggtgctctatcatctggcgtcacgtggtattgagtatgatttattgccgtggtgtcaacaacagcgaatgccagtgatggcctatagcccgctggcgcaggctggccggttacgtagcggtttactgaatcatccggtggtgaatgaaattgcgcaagcgcataacgctacggcggcgcaaatcttactgacgtgggtgattgcgcatccgggcgtgatggcgatcccgaaagccggaagtacagaacacgtgaagcaaaatgcggcggcgcttgagatcgccttgtcagcaaacgaacttgccttactggacaacgcctggcctgcgccaaaagggaaaaccgcgttggatatggtgtgacgccggataaaatgtgtaagcgccgccatccggcaggtcatgcctgatggcggctgacgcctttcagatcctatagtaacgccgttatccattcacttttagcgtttagcgacgcagatagtctgcgccagacgagagggtttttcttctgtggcttgttgcggcgcagtagcgtaaaccgtttcaacgcagacaaacgttttatagccgtcatccggcatgtcgcccatgctgacggacaacgccgggccagggttccagcctacgacgttaaggtgatggtggtggaccacatcaatcgtgcggtttaatgtcgcatcgtggatcacgctacatgcttcaggattgaggtaaacgcgatcggtacggtccggaaaggtttgtataccgtcggtcaggacaccttctttagcgtcgttaactttatcaataaaccgatcgccgagtccgctgaccttaacgttggcgatgtcgccaacgttaaaatagctgtggagcgcggatgtggttgcaaattcgccatgcgcttccagttcaatttcacaggttttacccactttaaaacgtgccagcagcgtgaaatcgtgcggccagtatttccgggtggcctcactgctttgcagctcaaatgtcagcattacgccattatcatcttcattatgcgcttttagcgcccacggaagattacgcgcaaagccgtgtgacggcagaccctgttgagccgcaggtccaaaccagggccagcagatcggtacaccgccgcgtagcgccacgccggttttgaaaggcgtattattactgagccacaatacctcttcctcgccaacgggtttccaggagagaaggtgcgcgccctgtaatgcaaaagaggctttaacctgcggatggtcaacgacgatcagatccaggtcatcaagctgacgacgggaaaggacaggggtaagctgttcgataaccgggagggcaaaaattttattaatcattacgcaatcctcttaaccctaaataattcgagttgcatgacaaggcgcttgtgccttgaccagtgcttgcgctggcccgtagaggcgaggccgcaggccgagtaacgcggcaagtgaacgacaaattcatcgggaacgaatttgaacaaccgtaggtaatctccggccagggacatggacatccctgattcatcccgataagttcgacttccgtcagtgattcgggtgagaaagcatagccaacacacctgcaacttgaagtatgacgggtatatctttaagcaaaaaaaagagcgacctgagtcgctcttaccaatgactgtgtcatctcaacttatttggagatgtgagcaatcaggtccagtactttgttggagtaaccggtttcgttatcgtaccaggagaccagtttcacgaagttgtcgttcagcgcgatgcctgctttagcatcgaacacggaagtgcatacttcaccgttgaaatcggtagatacaacgtcgtcttcggtgtaacccagcacgcctttcatttcgccttcggcagcagctttaacagcagctttgatctgctcgtaggtagccgctttttccagacgaacggtcaggtcaacaacggatacgttcggagtaggaacgcggaacgccataccagtcagtttgccattcagttccggcagtactttacctaccgctttagcagcgccagtagaggacgggatgatgttctgagatgcgccgcggccgccgcgccagtctttgtgagacgggccgtcaacggttttctgggttgcggtagtcgcgtgaacagtagtcatcagaccttcgatgatgccgaagttgtcgttgataactttagccagcggcgccaggcagttggtggtgcaggaagcgttggaaacgatgtcctggccttcgtatttgtcaaagttagcgcctttaacaaacattggggtgttgtctttagacggacccgtcagaaccacttttttcgcgccagcggtgatgtgtttacgcgcggtttcgtcagtcaggaagataccggtagcttcagccactacgtcaacaccaacttcgtcccatttcaggttagccggatcgcgttcagcggtaacacggatttttttaccgttaacgatcagatgaccgtctttcacttcaacagtaccgtcgaaacggccgtgagtggagtcatatttcagcatgtatgccatgtactctgcgtctaacaggtcgttgattgcaacgatctcgatgtcagaacgtttctgagcagcacggaaaacaatgcgaccgatacggccaaaaccgttgatacctactttgatagtcatatattccaccagctatttgttagtgaataaaaggttgcctgtaaaattacaaaaaccttacgcagcgtcaagcggaatcgtgtcaatcattgcgacaaatcaatcctctgcacaacctttgcgcggctgattcgcctcactcttcctttcggcttgaaaccacatgggggcgccgccccgaattttaaagggcaaccgagataataatgtgacatcagtcacgattcgtgagccgccatttcgcaatgatcaagtttagaacaaaagttggtactgaggtgttaatgttttgttagaatcggtcaggcaatgtgagcacgtttaaagtgagatgtgagcaaatggctaaccaaccttcagcagaagaactcaagaaaaaattgtccgaaatgcaattctacgtgacgcaggatcgtggcacagaaccgccatttaccggacgcctgctacataataaacgcgatggggtttatcactgcctggtctgtgatacgccgctttttcactcccacaccaaatacgattcaggctgcggctggcctagcttttaccagcctgtcagcgaagaggcgattcgttacatagacgatttttctcatggaatgcagcgtgtcgaaattcgttgcggtaactgcgatgcgcatctcggacacgttttcccggacgggccgcagccaaccggtgagcgctattgcgttaactcggcctcgctggccttttctgacgagaaaaacggcgatcaactgaaaggctgaaaaaacgattcagcaaattattccacaggagcggacacatcatgaatcttgatgagatcattaacagcatgacgccggaagtgtatcaacgtttatccaccgccgttgagctgggtaaatggccggatggcgtggcgttgacgccggaacagaaagaaaacagcctgcaactggtgatgctatggcaggcgcggcacaataccgaagcgcaacatatgacgatcgatactcacggtcagatggtgatgaaaagcaagcagcagctcaaagcggatttcggtattacgtcaaagccgattgcgacattgaaaatgcagtaacggcagccggataagaggtagccgccatccggcggtttcattgccaatgcgttgtgcttaccgggcctgctcattgctgtcaggcacaggcccgccatatttttacccattaacgcttaatgtccagcgagtccgccaactgtttcgctaactgattattgtcatcggtgccttattcccagaacattgcgccagccagcccgcgctttttaatctgttttgttagaagcgctctccagcctgcgttgagctttgcctggtagcgacgctgacgtgacgtatccggcccaaagatctatgcaatggtctcaccgttgcgtgatgtattgaccggatacgatacctgctccgctacctggcgacagcctggccctgcgtctcttcccagtctgccagcgtatacagcgtcgcgcctgccgacgccatctccataaacgcgtgcgcgctatcctgcgggtgaatattcacgccgcgacagccatcggtgataacgttaacggcatagcccaactctagcgcatccagcaccgtaaattttacgcagtaatcggtcgccaaccccatcacgataagctcggtaacgtcatgctcgcgaagccaggtatcaagggtagttttctgccgatgttcgttgtcaaaaaacgcactgtagctatcaatcagcgggttttcacccttatagatgcaggcgtcaatcgcatgttggttaagcaggggatgtaacgccgcgccgtcggtatgttgaacgcagtgatccggccagagcgtttgcggcagcccgtccagctttccctgactatagggttccgcctgatgctggctggcgaagctgccatgctgcgcgggatgccagtcctggctggccagcaccggaatctgccggggctggcaccagtcaataagagcgttggcgatgtcgatggtgctgtcgccttccgctacagccagcgcgccgccggcgcaaaaatcattttgcaagtcgaccagtaataaggcccggtttgtcattatcttctccttgtcgtcgggattttttaatcatccggcgtcaattcaccacgcaagttttgcgccatcgcgctacgaatcgcctgagtgtccagaccctggcttaacaaataatgcagtttggttaaggtggcttcgacggtcatatcggcaccgccaatcacgccagcgtgcgccagcgcattaccggtagcgtacccgcccatattgactcgccctgacatgcattgcgtcaggttaaccaccacgatgccgcgcgaactggcctctttcagctcctgtaaaaacgctttattttgcggcgcgttgcctacgccataagagcgcagaatcagcgcttttaccggctgacgcagaaagttacgtactacctcggcggaaatccccggataaatcgtcactacgcctatcggctgcggcgtaatagggtgaacgattaattcaccagaaccgtagggcgcgggaggcgtatttaaacggcgaatgtgaattcctgcttccagcaagggcggcagattgggagaggcaaaagcgtcaaacccatccgcatgggctttggtcgtgcgattaccgcggaacagacgattattaaaaaacagcgttacttcattaatagggtagttggcggcgacataaagcgcattcagcaaattaatttgcccgtcggagcgcagctcagccagcggaatttgtgaccctgtcacaatgaccggtttacccagattttccagcatgaaagagagcgccgatgcggtaaacgccatcgtgtcggtgccgtgcagaataacaaaaccgtcatactcatcgtagtgcgctttgatatctgcagcgatatgctgccagtcttccggcgtcatatctgatgaatccatcagcggggcatattcatggatggtaaaatccggcatctccgggcggtggaattccggcatcagcgccagctggcgctgaaggtgcccggacaccgggatataccctttatctgagcgctgcataccgatagtaccgccggtataggcaacgtaaattgatttcttttgcatgataatgttcagtcgtgtcgcgaaggacgtattaatgattatcggatggcggctatgagcagacgccgccatccggtatggctattgatgaagcattagcgaacgttcgcgcaagtcaaacagaacgcataacggttttgcggatcgttaaatgccgccagtttatccccctcggccttcaccgtgttggcggcggaaacgagcggcgccgggagcatcgcctgaatggtctccggcagcatggcgcgtactgatccggtcatactgtccatgaccatatcaaggaccgtcggttcgtcctgatagtaatcaagatgccactgtttcagtttcgccagctccgccgctttggcgacggcgtcgtcaaagtcgccgagactgtccaccagaccattggctttcgcgtcttctccggtccagacatggccttgtgcgattttatcaatttgctccggcgtacgcttacgcgcgtctgccaccagcgtgataaagcgtttgtagccgtactcaatactgagttgcatcatctgctgcacttccggtgacagcgctttggtcatcgaaatatccgccagcggcgaggtggaaacgccgtcgctgtgtacgccaatcgacgacaggctgttttctaccgtattgatgacgccgaagatgccaattgaacccgtcagcgtgctggggctggccacgatatagtttgccggcgtagagatccagtaaccgccggaggccgccataccgcccattgagaccaccaccggtttgccagccgctcttgccgccgccagttcggcgcggataacttcggaggcgttgacgctaccgcctgggctattgacgcgcagcacaatcgctttcactttaggatcaaggcgtgcgtcgcggatctgcgatgccgtagtgtcgccgccgacattccctggcgtttcttcgccatccataatcgcgccattggcgaaaataaccgcaatagtaccgccggtatccgcaggcgttttcagcgaataatcgtaatagctgatcgcgcgatagttattttcggttttgctccagccaaactgcttcgtcagcgctttttcaacatctgcgctggaggcgagggcgtccaccagtttatggtcgagcgcatatttggcggtgtcgccgcccacgctggttaacccgtcgataatagcctgcgcgccggggaagagttgttgcggcgaaatctggcgattggcggaaacggtatgcaggtagttctgccacagttcgcctatccagcggctgtcggcctcgcgggcggcgggcgacatatcgtcgcggataaacggctcgacggcggatttataggtgccgacccggaaaacgtgggtagagactttcagtttatccagcagcgttttgtagtacaggccattcgtagcgaagccgtgaagatctacctgaccctgtggggaaagccaaattttattagcgaaactggcgagataatactgaccctggctgtagttttcacccacggcgaaaaccggtttgccgctgtcgcggaattcgcgcagcgctttaccgatatagcgcattgatggctgatcggcgccggtgaagtttttcagatccagaacgatacccgtgatattacggtcatctttcgcctgacgaatagcgttgacgatgtcaaacagggagttttcctgcagacggtcggagctggcgccaaataactggcgacccagcgcgcccagacgatgattggtggagggtttatccacaatgacgccggaaatatccagcagcagagcgccgcgcgcggtttgctcactgttgctgccgttaccgatctgcatccagatcccaacgcccaccaggaccagaaaaataaagaacaggttgagtaccatttcacggacgaagttcaacactcgccacgtccatttaaaaaatccggcaataaatcgccacagggttcgcatgtattctccctatctgagtaacaacgcttgtaccttggtgaggataaagcattaagatgtggctatcgtaatgacccatcaggcagttgtcagcaggaatcactgcctgcgctgtaacaaaatccgctcccgtgttaattttgtgaataaatatcattgctggagttaatcaaatggatgcactagaactgctggtcaaccgtcgtagcgcctctcgtctcgcagaaccggcgcctgtcggagagcaattacagaacattctgcgggcgggaatgcgtgttcccgatcataaatctctacagccgtggcgtttttttgtgattgaaggagaggggcgcgaccgcttcagcgccgtacttgaacaaggcgctgtcgctgccgggggggatgagaaggcgatcgaaaaagcgcgtaatgcgccgtttcgcgcaccgctgattattaccgtggtggcgaaatgcgaagaaaaccataaggttccggtgtgggaacaggagatgtctgccggatgcgcggtgatggcgatgcaaatggcggcgattgcgcaagggtttaatggtatctggcgtagcggcgcattaacggagagcgctattgtgcgggaagcctttgagtgccgcccgcaggataaaattgttggttttctctatctcggcacgccgcagctcaaagcgtcaacgacgatcagtacccccgaccccacgccgtttgtgcgttatttctgacgctgagggataaaactgtctggattctgagcaaaggcgcggtaattcagacagtgatacttaccacatcagggaatgagcgctaccatagcgcgaatgcaatgacaggagatgtccatgagcgagcaagccattcgtttaacgcaatacagccacggcgctggttgcggttgtaaaatttcccctaaagtgctggagactatcctgcatagcgagcaggcgaagttcgtcgacccgaacctgctggtgggtaatgaaacccgcgatgatgcggcggtttacgatctgggtaatggcaccagtattatcagcaccaccgacttctttatgccgatagtcgacaacccgtttgattttggccgcattgcggcaacaaacgccatcagcgatatttttgcgatgggcggcaaaccgattatggcgatcgcgatccttggctggccgattaataccctgtcgcccgatattgcgcgtgaagtgaccgagggggggcgttttgcctgccgtcaggccggtatcgcgctggcgggcggacactctattgacgccccggagccgatctttggtctcgcggtcacaggcgtagtgccgaccgaacgggtgaagaaaaacagtaccgcgcaggcgggatgcaaactctttctgaccaaaccgttggggattggcgtgttgaccaccgccgagaaaaaatcgctgcttaaacctgaacatcaggggctggcgacggaagtcatgtgtcggatgaacgttgctggcgcggcgtttgccaatatcgacggcgtaaaagctatgactgacgttaccggttttggcctgctggggcacctgagcgagatgtgccagggcgcaggcgtgcaggcgctgctttgctatcaggacatccctaaactgccgggcgtggaagagtatattgctctgggcgccgtaccgggcggcacagagcgcaacttcgccagctatggtcatctgatgggcgacatgtcgcgtgaagttcgtagcctgctgtgcgatccgcaaacgtcaggcggtctgctgttggcggtaacgccggacgccgaagacgatgttaaagccaccgcggcggaatttggtatcgatctgaccgcgattggcgaactggtcgaggcccgcggcggtcgcgctatggttgagattcgttaacctgatgcggttgtttattgccgaaaaaccgagtctggggcgcgccattgcggatgtgctgccaaaaccgcaccgtaaaggcgatggttttattgagtgcggaaacgggcaggtcgtcacctggtgtattggtcatttgctggaacaggcgcagccggatgcgtatgacagccgttatgcgcgctggaatctggctgacctgcctatcgtgccggaaaaatggcagcttcagcctcgtccttccgtcaccaaacagctcaatgtgattaagcgctttttgcatcaagccggtgaaattattcacgccggcgacccggatcgcgaagggcagcttctggttgatgaagtgctggattatctccagcttcctgccgaaaagcgccagcaggtgcggcgttgtctgataaacgaccttaacccgcaggcggtcgagcgtgctattgacaggctgcgggcgaacagcgacttcgtgccgctgtgcgtatccgcgctggcgcgagcgcgagcggactggctgtatggcattaatatgacccgcgcttacacgatcctgggccggaatgccggctatcagggcgtgttatccgtgggacgcgtgcagacgccggtactggggctggtggtgcggcgagacgaagagattgagaacttcgtcgccaaagacttctttgaagtgaaggcgcacatcgttacgcctgccgacgagcgttttaccgctatctggcagccgagcgaggcgtgcgaaccttatcaggatgaagaggggcgcttgcttcatcgtccgctggcggagcatgtagtgaaccgaatcaacggtcagcccgcgctggtaaccagttataatgataaacgggaatcagaatccgcgccgctgccgttttcgctctcgacgctacagattgaagccgccaaacgctttggcctgagcgcgcaaaacgtgcttgatatttgtcagaagctatatgaaacccacaaactgattacctatccgcgttccgactgccgttatctgccggaagaacactttgccggacggcaggcggtcatgaacgcgattagcgtccacgccccggatttactgccgcagcctgtggttaatcctgatacgcgcaatcgctgctgggatgacaaaaaagtggatgcgcaccacgcgattatcccgacggcgcgcagttcttctgtccatttgacggaaaacgaagcgaaagtgtacaccctgattgcgcgtcagtatctgatgcagttctgcccggacgcggtgtttcgtaaatgcgttattgaactggaaatcgccaaagggaaatttgtcgccaaagcgcgttttctggcggaagccggttggcggacgttactgggcagtaaagagcgcgacgaggaaaacgacggtacgccgctgccggttgtcgccaaaggtgatgagttgctgtgtgaaaagggggaagtggtcgaacgccaaacccagccgccgcgtcatttcactgatgcgacattgctttccgcgatgaccggaattgcccgcttcgtgcaggataaagatctgaaaaagatcctgcgcgcgaccgatgggctggggacggaagccacgcgcgccgggattatcgagctgctgttcaaacgtagctttctgaccaaaaaaggtcgctacattcattctaccgatgctggcaaagcgttaatacattcgctgccggagatggcggcccgtccagatatgaccgcgcactgggaatctgttttgacgcaaatcagcgaaaagcagtgccgttaccaggatttcatgcaaccgctggtcggcacgttatatcagctgatcgagcaggctaagcgcacgccggtgaagcgcttcagagggatagtcgcgccaggcggtggagacaagaaaaagagcgcgccgcgtaagcgagcgggcaaaaaaagcccgcctgctgcggagacaggccgtcagaccgaataagcgtaaagctatctggcctgacgacgggattaaatgacgccctgcgccagcatggcgtcggcgactttcacgaaaccggcgatgttggcgccctgaacgtagttggtatgcttattgtcgccgccgtattcgacacaggcgtggtggatatccagcataatgtgatgcagacgggcgtccactttctcggctttccagctcaaccgcgcggcgttctgcgccatttccagccccgatgtcgccacgccgcccgcgttggcggctttacccggcgcaaacagtacgcccgcttcaaggaagagatcggtcgcttcaatcgtggttggcatatttgccccttccgccacggcttttacgccattggcaatcagtacgcgcgcggcgtcaacgtccagttcgttctgcgtcgcgcatggcagggcgatatccaccggtacgctccagggctgctggccttccagataggttaagccaaactcacgggcgtagtcagcgacgcgaccgtcacggctggctttaatttcacacagacgcgccagcttctctggcgtgaagccactttcatcgaccaccgtcccgctcgaatccgacgcggtaaccacgcgcgcgccaaaggccatcgctttctcaatggcgtattgcgctacgttgccggagccggacacggcgacgcgcatcccttcgaaaccgagaccatgacgtttaagcatcgcttcggtaaagtagaccaggccatagcccgtcgcctccgggcgaatcaggctgccgccgaaggaaagccctttgccggtgaagacgcaggagctgttattggaaagcttgcgcatcattcccgccataaagcccacttcgcgcccgcccacgccgatatccccggcaggcacgtcggtatccggccctaaatggcgatacagttcagtcatcagcgcctggcagaaacgcatcacttcgccttcgcttttccctttcggatcgaaatcgctgccgcctttaccgccgcccatcggcaacgtggtgagggcatttttaaaggtttgctcaaagccgaggaacttaaggatggaaaggtttaccgaaggatggaagcgcataccgcctttataggggccgatagcagagttgaactgcacgcgccaggcgcgatttacctgcacctggtttttgtcgtccagccacactacgcgaaactggattacgcgctctggttcaaccaaacgttccagtaaagacatgtggcggtaacgggggttttgttcaagaaacggccacagggtggtcatgacttcacggacggcttgcgcgaactcggtttgatgcgggtcgcgcttttgtacatggttgaggaacgattccagagaacatgtctgatccatagatataaaaacctcttatatattaatgtggttgtatttgcgttttatcagaatatgtatttgcagttttcgactataccatcagcaatgtgacggtaagcaagaaaaaaatgacgctgctaagtaaattcataacggggcgagggtcataactaaaagcgatgacaaaagaggattaaagttttcacggcggcttaccgttatactgagaatatacttagaaaaataaggaaatcctatgcgccgaagcctcgtggtcgccgtgatggcgataatgccaatggtcgggctggcaaaccagaacagtcgtcctgatattcaggtgaatgtcccgccggaagttttcagcacgcgcggtcagtcgtcccagccctgcattcagtgctgcgtttaccaggatcagaattactccgaaggcgcggtaataaaagtggaaggcgtcttgctccagtgccagcgtgacgaaaaaaccatcagcacgaatccgttagtctggcgtcgcgtaaagctataaacgcctgcaatagcggaatatccgccggggcgagggggtactccagcgcctcttccggcgtacaccaggctaatgcctgatgttccagcgcacgtatcagaccgttaaacgcaggcacatgccaggcgtgcaaatgaattcgtcggccagacacgtcgcgttgatggctggcgatatagacgccgggcgtggcgtcaatccctaactcttcgcgtagctcgcggataagcgcctgcggctgggtttcgccgggttcgactttaccgccggcaaactcccataaaccggcttgatccgcatgagctgggcgctgggccagcagaattttgccgtcgcattcaatgatggcggcaacaacatcgagtttttttatcattgtcgttaaggtcgttattcctgccgggaagcgtcgcgctatcccggccttacggttaatcagaaagcggaatcaaacacgaaacgtcgcccagaccggcgcatggtcggagggtttttccatactgcgaatgtcgtagtctataccggtttctgcgcaacgttccgccagcggagcgcttgccagcaagaggtcgatacgcagcccgcgattatccacgaaacctttcgagcggtaatcaaaccacgaaaatttatccatcgtttgcggattcgcctgacggaacgtgtccactaatccccacttcagtaaccgtgacatccattcacgctcctccggcaggaaggagcatttaccggtacgcagccagcgtttgcggttttcttcgccgatgccaatatccagatcggtcgggctgatattcatgtcgcccataattaataccggattatcgcacttgagttccgtttcaagatagttttgcaagttctgataaaactgcgctttcgcggggaacttcaacggatgatcccggctttccccctgcgggaaatagccgttaatgacggtgatattacccagcggcgaggggatttccgccatgataatgcggcgttgcgcctcttcgccatcatccgggaaaccgcgtctgacggaaatgggcgtggcttttgttagcagcgcgacgccgtaatggcccttttgtccatgatagaaaacgttatagcccagcttcgcgacctcttcgagcgggaacatttcgtcgtggacttttgtctcctgtagaccgatcacatcgggctggtgtttttcgacaatcgcttcaagctgatggggacgggcgcgcaggccgttgatattaaaagagacaaatttcatagtcactgccactttgcaaggtgaatcgtgttgggatggtaacagaaattttaccgggtgactgccactcatcgtcagattcggccaatggaagcgtatggtgttttctatagcgcgaaaatggcacggtttgcgtgcagatgcgccagaacggggcggtaatttccagtaaatttcgtataagatcacaattccagaattatatttggcaactgaataatatttcgctttttcctctttttagccaccgattatgcggaaatattcacttttcatgcagtaaaagtgaatatcgctacgctgtaacccattgatttaccgtttatcacctctgtttatgcaatgttaacgctggctggcacgaatgctgcaatctacatttacagcgcaaacactcatattaattaacatataaataactttatttttaccaaaagaggtcgctatgtctctgtcagttacgcgcgaaaactttgatgaatggatggtgccggtatacgttcccgcgccttttattcctgtacgcggagaaggctcacgcctgtgggatcagcaggggaaagagtatattgattttgctggtgggatcgcggtcaacgccttgggacatgcgcatccggcgctgcgcgaggcgttaaatgaacaggcgaatcgcttctggcatatcgggaacggttacaccaatgaaccggcgctgcgactggcgaaaaaactgatcgacgcgaccttcgccgaacgcgttttcttttgtaattcaggcgctgaagcaaatgaagctgcattaaaactggcgcgcaaatatgcccacgatcgtgtcggcaaccataaaagcggcattgtggcctttaaaaacgcgttccatggccgcacgctctttaccgtcagcgctggcggtcaacccacctattcacaggactttgcgccgctgccgccggatattcgtcatgcagcctataacgatctgaactccgccagcgcgctcattgatgacaatacctgcgccgtgatcgtagaaccggtgcagggcgagggcggcgtgatccccgccacgaaagcttttttgcaggggctgcgtgaattgtgcgaccggcatcaggcgttactgatttttgatgaggtgcagacgggcgtcggacgtaccggcgaactgtatgcatatatgcattatggcgttacgcccgatatcctgacgaccgctaaagcgttgggcggcggcttcccgatcggcgcgatgctgaccacgcaagactatgccagcgtcatgacgccaggcacgcatggcaccacctacggcggtaatccgctggcgacggcagttgccggaaaagtactggatatcatcaatacgccggagatgcaaaacggcgtcagacagcgccacgatgcgtttattgaacgtctaaatacccttaatgtgcgttttggcatgttcagtgaaattcgcgggctggggctactgcttggctgtgtgctacagacggagtttgccggaaaagccaaactcatcgcccaggaagcggcaaaagcaggcgtgatggtgctcattgccggtggcgacgtggtgcgttttgcgccagcgttaaatgtgagcgacgaggagatagccaccgggcttgatcgttttgccctggcgtgcgaacgccttcagacgggaggcgtaccatgcgggtgattcgtcctgtcgaacatgcggatatcgccgcgctgatgcagcttgcaggcaaaacgggcggcggcttaacctcgctaccggcaaatgaagcgacgctggcggcccgcattgaacgcgcgctaaaaacctggtccggcgagctgccaaaaggcgaacaagggtatgtattcgttctcgaggacagtgaaacgggtgaggtcggcgggatctgcgccattgaggtcgcggtcggccttaatgacccctggtataactatcgtgtcggtacgctggttcatgcctccaaagagctgaatgtatataacgcgttgccaacattattcctgagtaatgatcacactggcagcagtgagctttgcacgctgtttctcgatcccgaatggcgtaaagagggtaacggctacctgttgtcaaaatcgcgctttatgtttatggccgcgtttcgcgataaattcaatgagaaagtggtggcggaaatgcgcggcgtcattgacgagcacggttattctcccttctggcaaagtctcggcaaacgctttttttctatggatttcagccgggcggattttttatgcggtaccgggcaaaaagcgtttatcgccgagctgatgcccaaacatcctatttatacccacttcttatctgaagaggcacaggccgtgattggcgaagtccacccgcaaacggcgccagcccgcgcggtgctggaaaaggaaggctttcgctatcgccactatatcgacatcttcgacggtgggccgacgctggagtgtgatattgaccgggtgcgggctattcgtaaaagccgactggttgaagtcgcggaagggcaacccgcgcctggcgactatccggcatgtctggtcgccaatgaaaactatcaccactttcgggccgcgctggtgcgtgccgatccgcagacttcacgacttgtacttaccgcagcgcagttggatgcactgaaatgtcgcgcgggcgaccacgttcggctggtacgcctttgtgctgaggagaaaaccgtatgacgctatggataaacggcgactggataaccggtcagggcgaacgccgccgcaaaacgaacccggtgagcgcggagatactttggcaggggaatgacgctaatgcggcacaggtcgccgaggcctgtcaggcggcgcgcgcggcgtttcctcgctgggccagacagccttttgccgcacgacaggctatcgtagagaaatttgccgccctgctggaggcacataaagccgagctcacggaggtcatcgcacgtgaaaccggtaaaccgcgctgggaggcggcgacggaagtgacggcgatgatcaataagattgccatctcgattaaggcttaccacgccagaacaggcgcacaaaaaagcgaacttgtcgatggcgccgcgacgttgcgccatcgtcctcacggtgtgctggcggtattcggcccttataactttcccggccatttaccgaatggccatattgtgcccgcgttgctggcaggcaatacgctgatcttcaaacctagcgagctaacgccatggaccggggaaacggtaataaaactctgggaacgggcggggctaccggcaggcgttcttaatctggtgcagggcggccgggagaccggacaagcgctgagttcgctcgacgatctcgacggactgctgtttaccggcagcgccagtaccggatatcagcttcatcgccagctatccggccagccggaaaaaatcctggcccttgaaatgggcggaaacaacccgctcattattgaggatgcggcaaatatagatgcggcggtacatctgacgctgcaatcggcgtttattaccgccggacagcgctgtacctgcgcgcgacgccttctggtaaaacagggtgcgcagggagatgcatttctggcgcggctggttgacgtcgccggacgtctgcagcccggcagatgggacgacgatccgcagccgtttatcggcggactgatttcagcgcaggcggcacagcatgtgatggaggcctggcgtcaacgagaggcattaggcggtcgcacgctactggcgccgcggaaggtcaaagagggaacctctctgctgacgcctggcatcattgagctgacgggcgtcgcggatgtgccggatgaagaggtgtttggtccgctgctgaacgtctggcgttatgcgcatttcgatgaggcgattcgtctggcgaataatacccgttttggtctgtcgtgtgggctggtgtcgacggatcgcgcgcagttcgaacagctcttgctggaggcgcgggcagggatcgttaactggaataaaccgctcaccggggcagcgagtactgcgccgtttggtggtgtcggcgcgtctggtaaccatcggcccagcgcctggtatgccgccgattattgcgcctggccgatggccagtctggaatctcccgaactaacgttgcctgcgacattaagccccggcctcgacttttctcgcagggaggcggtatgacggcgcatgaagttaattttgacgggctggtggggcttacgcaccattatgccgggctatccttcggcaatgaggcatcgacccgccaccgttttcaggtgtcgaatcctcgtctggcggtaaaacaggggctgctaaagatgaaagctctggcggatgccggctttccccaggcggtgatcccgccgcatgagcgaccttttattccggcgttgcgtcagctcggcttcacgggtagcgatgagcagattctggataaggttgcgcgtcaggcgccacgctggctttccagcgtgagttccgcgtcgccaatgtgggttgcgaatgcggcgacggtttgcccatcggcagacgcgctggacgggaaagttcacctgacggtggcgaatttaaacaataaatttcatcgcgctcttgaggcgcctgttaccgaagcgctgctacgcgccatatttcgcgatgaaagccagttttcagtgcatagcgcgttaccgcaggtcgcattattgggagatgaaggcgcggcgaatcataaccgtcttggcggcgagtatggttcggcaggcgtgcagctttttgtctatgggcgcgaagaggagaatgaaatacgacccgctcgttatccggcgcgccagagccgcgaagccagcgaggccgtggcgcgtcttaatcaggtgaatccgcaacaggttatcttcgctcagcagaacccggaggtcatcgatcaaggcgtattccataatgatgtcatcgccgtttcgaatcgacaggtattgttttgtcacgaagcggcgtttgcccggcagaaagtgctcattaatcagttgcgtacgcgcgttgacggttttatggcgatagaggtgcccgccggcgaggtttctgtatcagatgctgtggcgacctacctgtttaatagtcagttgctaagccgtaacgacggcttaatgctgttagtgttgccgcgggaatgtcaggaccatgtcggcgtctggcgctatctgaataagctggtggcggaggataaccccatcagcgcgatgcaggtgtttgatttgcgagaaagtatggccaacggcggcggcccggcctgtctgcgattacgcgtggtgttaacagaagaagaacgaagggcggtgaatccagcggtaatgatgaatgacgctctgtttacggcccttaacgcgtgggcggatcgttattatcgcgatcgcctgaccgctgccgatctggccgatccgttattattgcgagaaggccgggaggcgctggatgtgttaacgcgtctgctggatttggggtcggtttatcctttccagcaaacgggggcggctgatggataactttctggcgttgacgctaagcggcacgacaccgcgggtgacgcaggggaagggcgcgggttttcgctggcgctggttaggccatggtctgcttgaactcacgcccgatgcgccggtcgaccgcgcgttaattctttctgcggggatacacggtaatgaaaccgcgccggtcgagatgctggataagctgctgtcggcgctgtattcaggcagcttgacgttaacgtggcgagtgctggtggtactcggcaatccgcaggcgctggcggcgggaatacgctattgtcacagcgatatgaaccgtatgtttggcgggcgttggcagtcctttgccgaaagcgatgaaacgcggcgggcgcgtgagctggagctaagtctggagaccttcttttcatctggccaggcgcgggtacgctggcatctggatctgcataccgccattcgtggctcgcatcatttgcgttttggcgtattgccgcagcgcgaccgcccgtgggagacagattttctggcgtggctgggcgcggcaggactagaggcgttggtatttcatcaggcgcccggcggtacgtttacgcactttagctctgaacatttcggcgcgctttcctgtacgctggagttgggaaaggcgttgccgtttaggcaaaacgatctgacgcagttcaacgtaacctcgcaggcgttgtcggcgttgctgagcggtgtcgaaacgtcaacctcgttttcgccgccgctacgctatcgggtggtgtcgcaaatcacgcgtcacagcgacaagttcgcgctttatatggatgcgcaaacgctgaattttactgcctttgcgaagggaacgttgctggccgaggagggggataagcgcgtgacggtgacgcatgacgttgaatatgttctctttcctaatccctctgtcgcctgcggattgcgggctggattaatgctggaaagactgccctgataaatgtccctgtaagctcacgttaggattacagggatgatttgggacacagtttcatgctattacggattattcctggagaattgctttattaataagcgttgctgcgttatagttctgcataatttctgctatatcatgctgttgtatatttctctttcaactctgcgcaatttattctttttttcttcacaattggcgaaaaagtgttttttatactttcattgttttaccgttgttatgactaattgacgctaagacggttaaagttaatcacgacaacacggcgctgttttaaatatgccgtaaaaataactgaaaggaaggatagaaatatgcgtaaactgactgctctatttgttgcctctaccctggcgatgggtgctgcgaatctcgctcatgccgctgagactaccaccgccgcgccagcggatgcgaagccaatgatgcagcataaaggtaaatttggcccacatcacgatatgatgtttaaaaacctgaacctgacggacgcacagaagcaacaaattcgcgacattatgaaagcgcagcgcgagcaaatgaaacgtccgctgctggaagagcgtcgcgccatgcatgatattatcgccagcgataccttcgataaagccaaagccgaagcgcaaattacgaaaatggaagcgcagcgcaaggccaatatgctggcgcatatggaaacccagaataaaatttataacgttctgacgccggagcagaaaaagcaatataacgctaattttgagaagcgtctgacggaacgcccggcgcaagaaggtaaaatgcctgctgcggcagaataactttccgcataatttaagaccgccggtcttgtcgacaacacaatcgttgaggtggacaggatcggcggttttctttatgactggcgacagtcggtgtgcagttcaatgatctcatattgacctgacattaacggtttacagagaatcttatagccgtcctgatcaaaacccgcaggtgtgcgcaccagggtggcggcctcatccagcgagggtaccgcccccagccataaccaattgttgataatgtggaactgggtcatttgtgggcggctctcttttaacgcgatagcgcctttccagggccagcaaaccacacgtaaccgttccagcgaggcctgcagacgaagaaaatgcgcctgcggggtttcttgcccacaacacgcgccagcgcagcgcttcagagcgaaacgaaaacaggcgcgcccacggcttaccggttcaagccccagcaggccataacacaatttttgttcatcggcgaggttctgtaagctttgcagcgccgcccgacggttggcgaagaggccaaacaggtttggctcatgggaaaaatcgacgctgcgggcggaaacgacctcaatcttttgttcgctcaactggagagagcaaagctggcgattacgccgtaaccgcttgttaaacagcggctgttgttctttgatcagccgcgcctccagcagcaacgcgcccatttccccagcggtgcagatccagcttatccgccgcgcctgtcgcagcatagtggcctcgtcaggcgttcgcagatgtgaaagcacccggctgcgaatattcacgcttttaccgatataaagcggcagcgtatcgctttcgctatgaaatatatagacgcccggtaaggctggcgcttcgctgaggaaaggacgtaaatgttctggatattcgtaaatggccgccgcttcaaactcaaggcggggggctgattgacgccgtaccacagtgatctccgttaactggttattcatccagtataacagcggatgggtgattaaaaaagaggctgggaagagaggaggccggatagacgagcgatatccggcacaacagtagaagtacgcttaccttttccaaaagtcgtcgaataccgtaatcggtaaacggcgcttatgttcagtttttacataccagccttcgatagttttagcgatggcggggtccagcgttttgccttccaggtaatcgtcaatattgtcatacgttacgcccagcgcggcttcatcaggcagtgaagggcggtcgtcttccaaatcggcggtggggacttttttatacagatgctcaggacagcccagcgctgcgagaagctgtttgccctggcgtttgttaaggcgatgaagcgggttaatatcggtaccgccgtcgccatatttggtgaagaacccggttatcgcttccgccgcatggtcggtgcccaccacgacgccgtgagtcataccggcgatgctatattgcgctttcattcgctcacgcgctttttcattgccgcgaacaaaatcgctcagctcaattcccgcttcgcgcagcgcctgttcgctggcgaggacggcgcctttaatattgacggtgagtactctgtccggctgaataaaagcaatggcgtcctggcaatcctgttcatcagcctgtacgccataaggcagacgaacggcgataaactgcagcgcattatcaccggtctcttctcgcaattcggcgatagccatctggctgagtttcccggccagcgtcgaatcctgcccgccgctgatgcctaacaccagcgatttcaaaaagggataggttttcaggtacgctttaagaaaatccacgctgcggcgaatttcttcttcagggttgatatgcggtttcgcgccaagcgcctggattatctcttgctgcagagtcatttaacccccttcgacattaaaaaaatgaatctttaccctgttaaagctaacccttcgccgctgaaacaacaaggtttggcgggctaagcggtgtttaaaacaacatgtcgctgcgttagagaattttccgaaagactttttgtggcgaggcgcggcttgaaaaatgttctgatgtattccaggcttacataacacgctgataaacaagaggacggaaaatgaacaagaacgtagcaggaattttaagcgcagcggcggtaatgactatgctggcaggttgtacggcgtatgatcgtacaaaagaccaatttgttgagcctgtcgttaaagatgttaaaaaaggaatgagcagggcgcaagttgcgcagattgcgggcaaaccgtcatctgaagtgagtatgattcatgcgcgcggtacctgtcagacctacatcctgggtcaacgtgatggtaaagcggaaacctactttgttgcgctggatgataccgggcacgtgattaactccggctaccagacctgtgcggagtacgacactgacccacaggcgccgaagcagtaacaactgtacattgcctgaacattcaaggaaaccggcctgcgagccggtttttttgtgcctgccataaccttatttattatcgcgaattatttgcccgaaatgtgaggggggtcataacgccaggtcaatgagagacaatttagtgggtcaaggaaataccatccggtggtccgatcccgtatactcatttcagccacctaaaaaagtaaatccggttacgcaagtcgcccagagtatggatgcaggttgaggcttgcggcgtatctggttgacagataatcgcacatgaggaaggtttttatggaaaagaaacacatttatctgttttgttctgcgggcatgtcaacatcgttactggtatcaaaaatgcgcgctcaggctgaaaaatatgaagtgccggtgattattgaagcattccctgaaaccctggccggtgaaaaaggcccggcagcggacgtcgtgttattaggcccgcaaattgcttatatgctccccgaaattcagcgtttattacctggtaaaccggtagaagtcattgattcaatgttgtacggcaaggtagatggcttaggcgtgcttaaagctgcggtagcggcaattaaaaaagccgccgcgaattaattattttttaatttttcccgtcaaagagttatttcatacactaaccgcaatattttattgcggtatttaagggtatttttctatgagtaacgttattgcttcacttgaaaaggtactccttccttttgctgtaaaaataggaaagcagccacacgttaatgcaatcaagaacggctttattcgtttaatgccattaacccttgcgggggcgatgtttgtattaattaataacgttttcctgagctttggggaggggtcgtttttttattccatgggcattcggcttgatgcctcaaccattgaaacacttaatggattgaaaggcatcggcgggaacgtctataacggcacattgggcattatgtcgctcatggcgccattttttatcggcatggcgctggcggaagagcgcaaggttgatgcgctggccgccggattgctttccgtggcggcatttatgaccgtaacgccgtatagtgtcggcgaggcctatgccgtaggcgctaactggctgggtggtgcaaatattatctccggtattattattggcctggtggtcgcggagatgtttacatttattgtccggcgcaactgggtgattaagctaccggacagcgtaccggcttcggtgtctcgttcattctcagcattaattcccggctttattattctctctattatggggattatttcctgggcgctgtctaattacggttctaacttccatcagattattatggacactatctctacgccgctggcatcgctgggtagcgtggtagggtgggcatatgtcatttttgtaccgctgctgtggttctttggtattcatggttcgctggcgctgaccgcgctggacagcggcatcatgacgccctgggcgctggaaaacatctctatttaccagcagtatggctccgtcgatgcggcgctggaagccggtaaaacgttccatatctgggcgaaaccgatgctggattcttatatcttcctcggtggtagcggcgcaacgctgggtctgatcatcgctatcttcctggcatcccgtcgcgcggactatcgccaggtggcaaaactggcgctgccgtcaggtatcttccagattaacgaacccatcctgtttggcctgccgattattatgaacccggtgatgtttatccccttcattctggttcagccgattctggcggcgattacgctggtggcttactatttgggtattattccgccgattaccaatattgcgccgtggaccatgccaaccgggttgggggcgttctttaacaccaacggcagtgtcgccgcgttgctggttgcgctatttaacctggcggtcgctaccctgatttatctccccttcgtggtggtggctaacaaagcgcagaacgccatcgagcaggaagaaagcgaagaagatatcgctaacgcactgaaattctaaactccgcgccggcatgggatgccatgccgggctgaatcagaggaaagactatgtttgatcttgaaaatgttgtagataaccagaccgcggctgaggaactcgaagaagtcgttatggggcttatcatcaattctggtcaggcgcgcagcctggcatatggcgcgctcagaaaagcgaaagaaggcgattttgaggcggcgaaagcgatgatggaccagtcgcgcatagcgctcaatgaagcgcatcttgtgcagacaaaactcatcgaaggcgatcagggcgaaggcaaaatgaaagtcagtctggtcctggttcacgctcaggatcatttgatgacatcaatgctggctcgtgaactgatcgccgagttgattgagctccatgagaaactgaaataacagggggcggatgatgcagctacaggttaacgcaacggaaatcaaaacggtttatgagcagcagctcttcaatggcaaaaatttccatgtgtttatctataacaagacggaaagcgtcaccgggctgcatcagcacgactactatgaatttaccctggtattaaccggacgttattaccaggagattaacgggaagcgtgtgctgctggaacgtggagattttgtttttatcccggtggggtcgaatcaccaaagtttctatgagtttggcgcaacgcgtattctgaacgtaggaattagtaaacgtttttttgaacagcattatcttccgttactgccgttttgttttgtggcatcgcaggtatacagggcgaatagcactttccttacctatattgaaacggtgattgcgtcgttgaattttcgcggcaatgggctcgacgaatttatcgaagtggtgacattttatattataaaccgcttacgtcattaccgcgaagagcaggtttatgatgatattccacaatggctgaaagcaaccgtggagataatgcatgataaaacgcagtttggcgaacatgcgctggaaaatatggtgcgcctgtcggcaaaatcccaggagtatctgacgcgcgccacccgacgttattacagcaaaacgccgatgcaaatcattaatgagattcgcattaattttgccaagaaacagttggaaatgaccaactattcggttacggatattgcttatgaagccgggtatagcagtccaagtctgtttattaaaacgtttaagaagatgacctcatttacgccgaatagttatcggaagcgattgacggaaattaatgagtaacggtttgcattgctcgattaattacatttcacgcttgccccaatagcgcggggaacgtcacgctatttcttacgagcgggcatagcgtaatacatatcagtgttatacactgaagggagatattatgagccagaaattaaaagtcgtcactattggtggcgggagcagctacacccctgaattacttgaaggctttattaagcgctaccatgaattacctgtcaccgaattatggctggttgacgttgaagacgggaaagagaagctgggcattatttatgatctctgccagcgaatgattgataaagcaggcgttccgctaaaattgtataaaacgctggatcgccgggaagcgctgaaaggcgctaattttgtcactacccagctacgcgttggtcaactcaaagcccgtgagctggacgagcgtatcccgcttagccacggctatctggggcaagaaaccaacggcgctggcggtttatttaaagggttgcgtaccattccggttatttttgacatcattaaggatgttgaagaattatgtccgaatgcgtgggtcattaactttactaacccggcggggatggtgacggaagcggtttatcgtcataccaactttaaaaaattcatcggcgtatgtaatattcctgtcggcatgaaaatgtttattcatgacgtgctggcgctgaatgagaatgacgatctttccattgacctgtttggtctaaaccatatggtctttattaaagatgtgctggtgaatggcacctcacggttcgcagaattactggatggcgtggcgtccggtcagttgaaagcgtcaaccgtaaaaaatatctttgatctgccgtttagtgaaggattgattcgctcgctgaacatgctgccgtgctcttatttgttgtattacttcaagcaaaaagagatgttggcgattgaaatgggcgaatattacaaaggcggcgcgcgcgctcaggtcgtacagaaagtggagaaacaactcttcgacttgtacaaaaatcctgagctaaacgtgaagccgaaagagcttgagcaacgcggcggcgcttattattccgatgccgcttgtgaagtcattaacgctatttataatgacaagcagactgagcattacgttaatattccacatcatgggcatgtcgagaatatcccggcggactgggcggtggaaatgacctgcattctgggacgcaatggcgcgacgccgcacccgcgtatcacccgttttgacgaaaaagtgctggggcttatccacactattaaaggatttgaggtcgcggccagcaatgcggcgctgagcggaaactttaatgatgttctgctggcgcttaacctgagtccgctggtgcattccgaccgcgacgcagaagtcctggcgcgtgaactcattctggcgcatgaaaaatggctgcctaattttgccgcttgcatcgaagcgcttaaaggtaagcaccactgacagaggtaggctatggaacgcgtgttgattgtgaatgccgatgattttggcctgagtaaagggcaaaattacggcattgttgaagcatatcgcaacggcgttgtgacctccacgacggcgctggtcaatggcgaggctattgaccatgcggcgcagcttagccgcgagctgcctgcgcttggggtgggaatgcattttgttttgacgttaggcaaaccggtgtcagagatgccgggcctgacgcgagacggcctgttggggaaatggatctggcaaatggcggaggaggatacgcttccgctggatgaaattgcgcatgaactggcgtgtcagtatcagcgtttcatcgacgtatttggcagcgagccaacgcatctcgacagtcaccatcatgtgcatatgttcccgcaaattttccccatcgtcgcccgctttgcggcgcagcgcgggattgcgttacgtattgaccgccagacggtgttgaacgccgacgatctgccgtcggatttgcgcagcactcaaggatttagtagtgaattttacggcgaggagatcaccgaagcgtgctttttacgcattctggatgcctcggcgcatcgaggagaggcctcgctggaggtgatgtgtcatccggcgtttgtggacaacattattcgccagagcgcctattgttacccccgcttaactgaactggaggtgttgacgtctgcgtcactcaaggcagcgattgcggaacgtggatatcgtcctggcagttttcttgatatttagctcctgagtttgcggcgcaagaatgcgccgcattttttgctgtttatgcaggaatcgcgttaattttccccgcacgcgaccagacacggtgtgccgccatcagcgtcagcagagtgtccataaagtggtggtcaacgttatctgcctcaacaagtccttcttccccctggctatcaatgtttaaaagcgccttaaaccgtcgggcgtcgcctgccagtgcgatgggcttcagatgtttgtaggcttccagaaggtagtaacgggcatcgccgcaactctcgatatcggcaatattgccgcacggtactattaccgcatcgaccgttagcgacggcgcgccggcaaaggttgccgcaatcgttaatgttgaaccatcatcagccgttacttcacccatccgtgaatagagcagttttgcgtggacgcctttggcttttaaagcctgcaaaatggtcaacagttcggcggcgttaactttgtcgttcagcagaatagcgaccactcggcctttaacatcgccgtccggcaccgcatacaggctgagcgccggatcttttttcagaccgttgacatcaggaggcggggcaatttgcgtttgctcatgggtgagtgcaaaaccgagattatgcgcgacgccctgagccagcgtgacatcaatatgcgctaactgatcgaccacccgctcccgaatatacgcgcgggcgactttacccagttcaaagctgaacgcgtcaataatatgctgctgttctatcggcgtctgactgagccagaacaggcgaggatgcgagtaatattcaccgaaagaggggctgcgttcgcggattttattgccatccacgcgttcctggtatgattcgaagccgccgcgttttggcgctggcggcgtttcgcgtggccagttgtcattaatggagtttggttcatagttcgccggattggtgtcgatatccatccggtgcataccgtcacgctggaagttatggtaggggcaggtagggcggttaatcggaatttcgtggaagtttggcccgcccagacgactgatttgcgtgtcggtataagagaacagacgcccctgtaacagcggatcgttggtaaaatcaatgccgggaacaatatgtcctggatgaaatgccgcctgttcgttttcagcgaaaaagttatccggattacggtttaacaccattttgccgacgcgttgtactggcaccaactcttccggaatcagtttggtcggatcgagcagatcaaaatcgaatttaaattcatcctcttcggcaatgagttgtaggcccagctcgtattccgggaaatcgcccgcttcgatggcctcccacagatcccggcggtgaaaatccggatcgcgaccggtcagtttttgtgactcatcccataccagcgaggctttacctgccaacggtttccagtggaaacggacaaaggtcgctttcccttgtgcattgatcagacggaaggtgtgaatgccgaacccttccatcgtccgataactgcgtggaataccgcgatccgacattgcccacatgacgttgtgcagcgtctcaggctgtaaggaaacatagtcccagaaggtgtcgtgcgcactctgcccttgcggaatagcccaatgtggttcgggcttaacggcgtgcacaaaatccggaaacttatgcgcatcctggataaaaaagatcggcgtgttattaccgacgagatcgaaaattccctcttcggtataaaatttggtcgcaaaaccgcggatatcacgtacggtatcagcagaccccgcgccgccctgtactgtcgaaaagcgaacaaagaccggggtaattttctgtggatcgcacagaaacgcggctttcgtgatgtcgctcaggtctttatatggctggaaatagccgtgcgctgcagatccgcgggcgtgaacgatcctctccgggatgcgctcatggtcaaagtgggtaattttctcgcgcaggataaaatcttccaacagcgtagggccgcggctgccggcgcgaagagaattttgatcgtcggcgatgcgcacgccctgattggtggtcagcgcataattttcgctgcctttacgaaaggcgtcgagggcagtgagcttatcattcgcggtctcgggcgcttttaagctgccgggggccgtcggttgcgcgcccggcggcgtcgtttctggcgtggggcgatgtgaaccgtctgacggcgccagggagtccaggccgggctgtgattcacgggtatcatgcacgggggactgatggggggatttctcattatgcgacattgaactcgtctcctgctttcatcactgaaatgggcgtggtagtagtcaaaatcactctaactatagaacatttcagcaattatgctgggggagagcggaacggcagacagggtataacagggaaatcgcacgcgcggaacaggacgtcgggggcgaagatcggctaaaatagtgtttttctgatttttagccttagagcctatcccagtaggcgttattggcgcagccagtttggacacggacagcgcgcaaaaaccggagcgtacacgtagtacgtgaggattttgagcactgcccaggaccaaaatggcaagtaaaatagccctaatgggataggctcttagcctcttttagtgaagcattaatgatgaaacctcttcgccagcaaaatcgccagattattagctatattccgcgtgttgaacccgcgccgccggaacatgcgataaaaatggatacgtttcgcgacgtctggatactgcgcggtaaatatgttgcctttgttctgacgagggagtcatttcaacggtcgcccgcctttagcgtgccagaatcggcgcaacgttgggcgaatcaggttcgccaggaaaacgaaatcgctgactaagaaaaaacaaaacgccggtactggagaccggcgtttttagtgacagacattttgagttgccgatcgtcatgtctcagacgatgtgaacgcccgataatgtattatcgatgcgccagttcagcgtcttcttcgctatcgagaatggttttatcggtctgcttcagccactggctggtcagcgtaccagcggtcattgagccactcacgttcagcgcggtacggcccatatcaatcaacggttcgacggagattaacagcgcgaccagcgtgaccggtaagcccatggcaggcagcacaatcagcgcggcgaaggtcgcgccgccgccaacgccggcaacacccgccgaacttacagtaacgatacccaccagcgtggctatccatacggggtctaaggggttgatgccgaccgtcggcgcaaccattaccgccaacatcgcaggataaagaccggcacaaccgttttggccgatggtcgcgccaaaagaggcagcaaagctggcgatggactccggcacgcccaggcggcgggtttgcgcttcgacattaagtggaatggaggcggcgctggagcggctggtaaaggcaaatgtcagcaccggccacaccttgcggaaatatttcagcgggctaatcccgttcacgcccaatagtatgccgtgaaccacaaacattatcgccagaccaagatatgacgctaccacgaagcttccaagcttaataatgtcctgcagattggagccggcaaccactttcgtcatcagcgccagtacgccgtaaggcgtaagttgcatcaccagacgcaccagcttcatcacccagctttgcagggtatcgatagcaacaagcacacgctcgccttttggcgcatcatctttcagcagtttaagcgcggccacgcccaggaatgcggcgaaaatcaccacgctgataatagacgtaggatttgcgccagtcagatccgcaaacggatttttcggtacaaaagacagcaccagttgcggcacgctgagatcggccactttgccgacatagctcgtctcaatggcattcagacgcgcggtttccgcgccgccctgaaccagaccttccgccgtcagtccgaacagattggtgaccagcacgcccaccagcgctgcgataagggtagtaaacagcagcgtgccgatagtcagaaaactgattttccccaattgagaggcgttatgcagtcgtgccacggcgcttaaaatagaggcgaataccagcggcatcacaatcatttgtagcaattgcacatagccgttgccgacaatattgaaccactgaatggagtcttttaacacctgactgtcagcgccataaatggtgtgcagggccagaccaaagaccacgcccatcacaaggccgacaagcacttttttagccagactccactgtttatgacgggcctgcgccagtacaaacagcagaatgacgaacaccgcaatgttcgcaattaatggaaaattcatccccgttctcctgatttttttattatgaagcgctgtgttttagcgattctgttcgcgcaagattagcagaactgtgagctggctcttatattcaaatggaatggtttataccaaaaatgattttggcgttgatttactaatcaatctggtgatttataaaacgattgaactgcatttgcaggatagtaatcatctgcgaagaccagcgtatgacgttgttttccggcatggactgtggcatccacaccgcccaggcaaacaacgccatgcataaaaatcgctccagttgattgcctttgcgcggcgccagaataggcaggcggaaacgccagcggcacggccacagtaagggaacgcctgcgggggtgagcatatccgcgacgatatggcttaaatagccaagtaccatgccttgcagcgcatccgccgggataatccacgtatccggtaccttgagataaaaggtcgccagtagggcaaagaccgccagcagactatgggtaaacccccggtgaccgaacgcgcgggcgatcggtttcgatacccatttcaggcgctgaccaagaaaagatttggggtggtcgatatccggcagcagacaggtcaaaatagccgaaggaataatatgccaccagtcgccgtgcgcaaggacgggcgttaactcggcattcttggcgaaaaccgcgctggctatagaaaaaagaagatgtccttccgccgtcatgataaaacccattaaactgtcaattcatacagtatagggtttttatacagtaggcggaagtggtgacgttgtaactctttgtctctgtcaaagccgcttgccgtctggctcagcggctaattgcccgttgactttgtttcggaaacatcttaaccgagtagatgcgccgccgtcagctctgtcagtgagttaagtttgacattcgccagcgcaaagcgcggatcaggctggttttcttctgctggcaccacaatggcgcgcattcgcgccgcctttgccgcgattaaaccattcaccgaatcctccagcgccacgcaggttaatggatcaacgcctaatttggccgcacaatccagatagacctgcgggtgcggtttgctgtagggcaatttttctgcagaagccagcgcgtcaaaactgtcgcgcagttcaaacatggtgagcactttttccagcatatgcagcggcgatgccgaggcaagccccactaatagcccctgcgctttacacagcgccacagcttcgcgcacacccggcaaaagagggcgcgtctcttcgataagcgtaatcgcgcgggcaataacacggtttgtcacttcctggcgatcggggccgttccacggttgctgcgcaaaccagagatcgacaaccatatcaatgcgtagcccaagcgtgtctggcagctcatggcgccgagtaatatctacgcctaaacttgccatcacgtccagttcagcgcgatcccagagcggttcggaatcgatcagtagtccatccatatcgaaaattgcagcaagaatttgacgtggggttgacatcacaacctctcctgttgagattaaaaaataacgaattaagcgttcattatgaccatgttcttagtatatcgcccttaaagatcaggcgaaaacgggaatcaacaggtagacttaggccaaaacgacgcgtctttatcaaggggaactcatgacgtatcaacaagctggacgcattgcaatcctaaaaagagttgttgggtgggttatttttattccggcactgctttccacgctcatctcagtccttaaatttatgtatgcgcacagtgaaaagcaggaggggataaatgcggtaatgctggattttacccacgtaatgatagacatgatgcgcgtgaatacgccgtttctgaatgttttttggtacaactcgccgacgccgaattttcagggaagcctgaatatcggtttctggctcatttttattctgatttttgtcgggctggcgatgcaggattccggcgccagaatgagccgccagtcacgttttttgcgtgaaggcgtggaagatcagttgatcctggaaaaagcaaaaggcgcggaagggctaacgcgtgagcagatagagtcacgtatcgtggtgccgcaccataccatctttttacagtttttcccgctctatattttgccggtcattattatcgtgctcggctactttttcttttccttgttaggcttcatgtaaactgaaaaatgccggatagcccgtatccggcatgggctgtacctataccgcaagcagccgatccatcgctttttgcgcagtagccaggtgctgaccgccaaacagccttgcccgattaagcagggtgtagagctggtaaatcggctgcctgtcgagaaaatccagcggtagcggcgaaacggactgatagccgtcataaatctgcggtggctgatcggtatgcagcggcagcatcgccagatcgcattctctgtcgccccaatagcaggctggatcgaagatataggggccgtcagggccaagcgcgcagttcgccgaccatagatcgccatgcaaaagagaaggctgcggttgatgcgacgccagacgttgctgaacatgttcaacaatggcgtcaatattaccaaaagtaatgcctttttccgcagcgagttcaagctgccagccaatgcgctgttcggcgaaaaaagtcgaccaacggcgttgccaggtattcggctgcggcgtggtagagagcgcgttatcaaaatcgaggccgaattgaggttggtcgctccattggtgcaggcgcgccagctgttgcccaagaataaacgcattatgggcatccagcgggcggggcgagaggtagtccatgactaaaaagctgtaatcccgatccgaacctaccgcccataccttaggcacaacaacggttttactgcgggagagcagctccagctgatcggcttctgcggtaaaaccgcggagcatttctcgttcatcgcacttcacgaaaaaatcatggcctgcataacgtaaatgccatgcggcatgaacttctccgcctggcagttcattacgcagttcgatttcgccttcaccgacttgctcgcttaaaagacgactgatagcttgccacataatgtctctccccacgttgtctgccagatcataaggttagtgcaaaaatgcggttgaaaaatacgaactaacgcacatcgcggacgcgccgcggcgggaatggcacttattgtgcgtttttactccacgcctcccaggtcgccacggtaatgtcgacatccttatctaacgcgcttttcgcaagtccggcgacaagcgctttgatttcatcagcgctctgagcgctaacaaagccaaacgtattggtgccgagctcatgcacatccccttcatcgtccgttaatgtcagcaaaaaaccgctacgcgtcagatggttattgagttcgttaatctcggtcagggaatcttcatggaaggttacggtaataacataacgggtaatatcgccactggccatcgttcacctcgttgggagcaactgtgtttttaacagcggcggatgcgccgcccgttaaccgattttccgttatccccctcggcgagggggaaacgattattgcgcggaaagataggcgtatattttttgggtatcgtcacgagaacacagacgcgtaccttgattgagcgtagcagcgctgcctgccgccacaccgaagcgcaccatctcttccagcgacgcgtcttgcgccagttttaacgtcatcgcgcctaccatactgtcgcctgcgccaacagtactttgacttttcaccgggggaggaacaacctggatgcaattctcactgtctatgcccagcgccccttgcggccccagagagaccactacccggcgagccttgccgctttgcactaattcctgggccgctttacgcacatcatcaggctgcgtcagatcacgattaaccaacgcgctcaattctttcaggttcggtttcaccagttcgatatcgccaagcgccagcgcggcggtgagcgcgtcgccagagctatcaataatgcagcgaatgccttgcttctgcgcggcggaaatcagttgcgtgagtttctcgaccttaacgccgggcggaaggctgccgctgataaccagaattgccccggattcaatttccagtacctgttcttcaagctggcgaaattcgtcatcgtccagcgtggcgccgggcataacaaaacgatactgttcgccgctggactcgacgtggacgtgcaggttctgacgcgtccagtccttcgcatcgacggtagacacggggacattttcgtcagccagtagtgcgacaagatgttcgccggtagcgccgccagccgggaaaatggcggtcgcggtgccgccaagatgcgcaatggcgcgagcgacattaatacccccgccgccgggttcgaataccggcgcggagcaccgcagtttaccttcgggataaatttgcggcgtgattgttgcgctatcgagagagggcgcaagcgtcaacgtatagatacgtaccatcgttacctcctgttaggctgatttcagtctggcacttaatccccggaaagtgaaggaattaacaatatgattttccggatctttatttaaagaagtgcgatgtaaagttatataaataaatgaatgcttcgggagggttcttattcaaaaaatgaaatagtaattgattgctatgttattcggggcttcttataattcgctacctttccaggggcgtttgtcattgatccctatgaaagtttccgggaccgtcgtggtctcttttttagttgtacggactctatataaatgaagcttttgaaggcagtacccgctgtagttatgctggcgggtggcgtgttcgcgtctctgtatgccgccgccgatgattccgtttttactgtcatggatgatccctccaccgcgaaaaaaccttttgaaggtaatctgaatgcgggctaccttgctcagtcaggcaatactaaaagctcttccttaacggctgacacggcgatgacctggtatggacaacgtaccgcctggtcattatggggcaatgccagcaatacctcctctaatgatgaacgctcttcagaaaaatatgcggtaggcgcacgtaaccgttttaatatgacggattatgattatacctttggccaggccagttggctgacagaccgtttcaacggttatcgtcagcgcgacgtactgaccgccggttacgggcggcagttccttaatggtccagtgcacagcttccgttttgaattcggtcctggggttcgctatgacgaacatacggacgataccactgaaacgcagccgttgggttatgcttccggcagctatgcctggcagttaactgacaatgctaagtttacacagggggtgtcagtatttggcgcagaagacaccacactaaattcggaaacagccctcaatgtcgccattaacgaacattttggtctaaaggtggggtataatttaacgtggaactcgcagccgcctgaatctgcgcctgaacataccgatcgtcgcactacggtaacgctgggctataagatgtaatattgtaccgggttacgttacgtaacccggttattccgtggtgacgcctcagaagaagaaggtgatgtctccgttgatataagaatagtcgtctccggtgcgaaattccgacgtgactttgtttaaagaaagagaaaatgcgacgggagaatagccgatggtggcaccgacgcgatattcatccacggttttattaatatccaccgtttccatttttgtttgcagcgttttcccctgtaacgtgtagtttttatcaacttccctgcgctcaacgccagcaaatactttatagatcaatccctctttttgagtgtgtattaaccctcggcgggacagtaacccaaacccattatcagagttgaaggtcttatcatttcccagcgcaacggttgcgccgtaccccaaatactggaagagattgccgccgacagcagatacttctggatagaagcccacattgacgcccagaatatcaatagctggcgtaagggacaccattccttttgccgtgtaaccataacggttttcaatttgatcctgccaggcagggtatttttctgcgcctattattcgatgcgcccgattctgaacctcctgaccgcctgcgtcaggaccaataacgccaatatcggtacctaaacgataacgtaaccaattggtggctaatgaattccactccagtccggtatgaagaaaggcgctgaacgcgcggtcgcctttgacggcttcaggctttctcttattggcgcctgatggagaataaatatcttgcgcgatatgaaaagagagttgactggcgtcagtgagatcgtggctgtagcctaaaaagagcccggcagtataatcaccccggtctgcagccgggtgcccataaagggcatttaaggatggttgaaatatacctgcatcatcattcgccactgaaatagcaaggctactggcattggccattgtggtcgtactgagtatggcggcaatcatcgttgcgcaatagctgtatttgttcactttttacccctgaatatgaaagtgaatactcttatttttacaaagtaataagcacagcagcatgatgcgcagtgcctattaaacctttaaatataactaaactcctgccagcagcgagtcattgagaggatacgttgccttaatgttgaaaaatggtgttgaaaaacatgcgtcagatattattgaatatccatttttcattcgctatctgagtgcgagaaattattggcttcacgattatgcatataatacgatgttttttggtatcaatatgaatatcacgttgtattcttttgagctcattttctatgatggcttcgatgtttatctgttattaatttttaccgtgatagtgttgtctttaatgatgagaatatctaacggctgtcagggtaatataaccaaattattgctatctgaattattagggcagttattattaaggaagaaaaagtgaacaagaccattaatttgctaaaattactgcccgtagtattattaagcgcatgtactacatcgtatcctccccaggatacaacatcggcacccgagttaccccatcgtaacgtactcgttcagcaacctgataactgtagcgttggctgtcctcaaggaggaagccaacaaacaatctatcgccatgtctatacgctcaataataatagcgtcacgaaatttgccaactgggttgcctatagcgtgacaaaaaccagccaggcaagcggtcgcccgcggaactgggcgcaggaccccgatttaccgccctcggatacgttggccccttccgcctataaaaatgcccatacgctattaaaagtcgacagggggcaccaggcgccgttggcaggattgggcggcgtatcggactggccgtcgttaaattatttatcgaatattacgccgcagaaatccgccctgaatcagggagcatgggctgcactggaaaaccgggtgcgcgaacttgccaaacaggctgatgtatctgtagtgcacgtagtgaccggccccctttttgagcggcatatcgccacattgccagaagatgcgacggtagaaattcccagcgggtactggaaggttttattcaccggaatggcgccgtcaaaaagtgaaggaaattacgctgcatttattatggatcagaatacgccccgttcggcgaatttttgcgactatcaggttaccgtggaggctatcgaacataaagcgaagccagtgctgacgctgtggtctgctttgcctgaagcggtagccagcgaggtgaaaacgacaaaggggagtctggcgcagaagttaggttgtcgatgagaagcgctatacggcgcgtagaaagataacggagaaaccctgtcaagggtcttgatttgctatagagtgatgcaatctccctttttttagtgttaccatcatcatgccggacgaagatagcgattttcgtctgtgtcgaaggttgtgcgccaatttagcaatggttggctagatggatacacaactcactgtcaataaattcattttctctttgtatgtgatcttgcgtaataagtacaatccttcattcacatccattctcgttcgtttaaacctgtttcaccagttccgcgtcattactggtaatagcggatatatatgtttcataccgttttacattgatccctttcgcgccgtaagatgtacgtacctaatctaacttaagcagggaactgtcattcataacacagagtttattggtatcaatggtagattatattacggtgacaatctcgggatgatccgcatatgagtagatgtggattagggcggagtagcggtaggactaataataaccggcggcgagaaatacataattgaggggctattcataaatcatcatctagaaacgcaagcactatcatgaatatatcataagtaatttacgttggtaatgatggctcagcaaacccaacaagctttacaggaacaatttttacgcttcagagccaaataaaacggcggcattgccgccgtataacttatttattgtttcttagtaaaacgaatcttatatgctctgaaaaaacaaaggaagatgcaatgtataccataaaagcaatcatcaaatgctcagggaacaaccatcccatgctaacaggaatcacacttattccaatgcaaaataggaacattatgaaataatgcgctgactttgtttcctgagttttattggagaaatacttagctaggacgcctttaaatactccagatataactaaccaaactggtgtaaaaagcccgaaatctgcgtatagttcaccatacccgaaagcaggagcgccctgatttctgtagaatgcatcagggaaaaatacttttgccagatacaatgcgccaaaatcttcaggcttatcaggccaaatagccctcggaatcctcgagtaaacctcgctttccattagtaattttccgtacataaagtcaaagtttgaggaagcaacaagaacagcattacgggtataatccgagtaattcgccatattttctatcggattcccatcagtaaacgtatatgcaaagaatgccgttacaatgactgctataacagcaaacgattttaccaggaacataaatttaatttttttattttcaatatatgaaaggtaaaggatgaatgctataaatatactaaatattggtcctttgttaccatgcaagaaaataagtatacagttaaataaaactatggaaatacaaaataactttgattttttgtatgtaaagaacgcgcaaatagaagcgacaagagaaaacattaatgaaggatagaagtatataccataccctgttctggttaattcgtatattcttcttgggctaagtatatactctctgaactccatcaacactggaaggtaaatgataaaagcaaggaaggtgaataacaatgaagtaaacacataccttggtttatttttcgtgtttgatttgttgtatatgggttttctttgtgtgtaaagataagaaataacaaatgatgctatgtatgttatatagcaagtatagaaaaacaaatattccactgtataattctgcacctctgagaggtatacaaatataccttcaaacacgtacagtgtagggactgttattatcaggtatgggaccattacatttattattttcccctcaattcttacggaaagagtatagagataaactataaataataagcataatgcaatgtatgaaattataagcatatagagcctttagaaaaaatgcttagtattaaaaatattaccatcaggcaaataaggtgtggtacggaaaatcttctggcaagatattctgaatctggtagtctataatcattactcatcactatcttcccgatatcaaaaccgtgttattgacatattaacactcattaacactcctatctactgcgcctccgatagcatgaagctatcaagcatttgcagcacaaacatcaaacaatgtaaatgcttttgataattacacatgattgttactgtgtttatatacagtggcattcgaagattcatcatgaggttcccgagtcctgtaaaagactatacagagaaagagctatcactcgacgagtaattcatctcacatcgtgccgcgacatacttcaagcaacacagacgaattacaagtacggcatcataagtgagacgttgctagttatagaagcttcatagcagcatgtaatggctctttgctggtatgtgctttggaaagtgggtttcgtattgtgcgttatcgcatgctgccaggtccccatctggagaatatagatagcggtcgtcgtgaaaagctatctgatgtgaatgcctcatacggtggcagtaagccgagactcagagtgaccatgtacatcattaacgatacgcgtgccgggtagtgtgttgggattcaggttctgtagaacagaaagatgcaatctccctttttttagtgttaccatcatcatgccggacgaaaatagcgattttcgtctgtgtcgaaggttgtgcgccaatttagcaatggttggctagatggatacacaactcactgtcaataaattcattttctctttgtatgtgatcttgcgtatgggtcaccactgcaaataaggatataacatgcctgttattactcttcctgatggcagccaacgccattatgaccaccctgtaagcccgatggatgttgctctggacattggtcctggcctggcgaaagccaccattgcgggccgtgtgaatggcgagctggttgatgcttccgatctgattgaaaatgatgcgacgctttccatcatcaccgcaaaagatgaagagggtctggagatcattcgtcactcttgtgcgcatctgttaggtcacgctatcaagcaactttggccgcacacgaaaatggcgatcggcccggttgtcgacaacggtttttactatgacgttgatcttgaccgcacgctaactcaggaagatgtcgaagcgctcgaaaagcggatgcatgagctcgccgagaaaaattacgacgttatcaagaaaaaggtgagctggcatgacgcgcgcgaaaccttcgtgaagcgcggcgagacttacaaagtcgctattcttgatgaaaatatcgcccatgatgataagccaggcttgtaccatcatgaagaatatgtcgacatgtgtcgtggtccgcacgtgccgaatatgcgtttctgccatcactttaaactgatgaaaactgccggcgcatactggcgcggtgacagcaataataagatgttgcagcgtatttacggtacggcatgggcagataaaaaagccctgaacgcttatctgcagcgcctggaagaggccgcaaaacgcgaccatcgtaaaattggtaagcagctcgacctgtatcatatgcaggaagaagcgccgggcatggtgttctggcataacgacggctggactatcttccgcgagctggaggtctttgttcgttctaaactcaaagaataccagtatcaagaagttaaaggcccgttcatgatggaccgtgtgctgtgggaaaaaaccgggcactgggacaactataaagatgcgatgttcaccacatcctcagaaaaccgcgaatattgcatcaagccgatgaactgcccgggccacgttcagatctttaaccagggtctgaaatcctatcgtgatttgccgctgcgtatggcggaattcggtagctgccaccgtaacgagccatcaggcgcgctgcatggtctgatgcgcgtacgcggctttacgcaggatgatgcgcatatcttctgcaccgaagagcagatccgcgatgaagttaacgcttgtattcgtatggtctacgatatgtacagcacctttggcttcgagaagatcgtcgtcaagctttccactcgtcctgataagcgtatcggcagcgatgagatgtgggatcgtgctgaggcggatctggcggttgcgctggaagaaaataatatcccgtttgagtatcaactgggtgaaggcgcattctacggtccgaaaattgaatttaccttatatgactgcctcgatcgtgcatggcagtgcggtacagtacagctggacttctccttaccgtctcgtctgagcgcctcctatgtaggcgaagacaacgagcgtaaggtgccggtaatgattcaccgtgcgattcttgggtcgatggaacgcttcatcggtatcctgaccgaagagttcgctggtttcttcccgacatggctcgcgcctgttcaggtagtcgtgatgaatattaccgattcgcagtctgaatacgttaacgaattgacgcagaaactacaaaatgcgggcattcgtgtaaaagcagacttgagaaatgagaagattggctttaaaatccgcgagcacactttacgtcgtgtcccttatatgttggtctgtggtgataaagaggtggaagcaggcaaagttgccgttcgcacccgccgcggtaaagacctgggcagtctggacgtaaatgacgtgattgagaagctgcaacaagagattcgcagccgcagtcttcaacaactggaggaataaagtattaaaggcggaaaacgagttcaaacggcgcgtccgaatcgtattaatagcgaaattcgcgcgcaagaagttcgcttaacaggtctggaaggcgagcagcttggtattgtgagtctgagagaagctctggaaaaagctgaagaagccggagtagacttagtcgaaatcagccctaacgccgagccgccggtttgtcgtataatggattacggcaaattcctctatgaaaagagtaagtcttctaaggaacagaagaaaaagcaaaaagttatccaggtgaaggaaattaaattccgtcctgggacagatgaaggcgactatcaggtaaaactccgcagcctgattcgctttctcgaagagggcgataaggccaaaatcacgctgcgtttccgcggtcgtgaaatggcccaccagcaaatcggtatggaagtgcttaatcgcgtgaaagacgatttgcaagaactggcagtggtcgaatccttcccaacgaagatcgaaggccgtcagatgatcatggtgcttgctcctaagaagaaacagtaaggccttcaagtaacaattctgtgaagccttcgggcttcacaggctttgttcgcctatgtttcgtttattaacaatgcgaagtggaagttattaaaatgccaaaaattaagaccgtacgcggtgctgctaagcgcttcaaaaaaaccggtaaaggtggttttaagcacaagcacgctaacctgcgtcacattctgaccaaaaaagcgactaaacgtaaacgtcacctgcgtccgaaagccatggtttctaaaggcgatctgggcctggttatcgcgtgcctgccgtacgcataagccgttaacgtttttaactttttaattagaatagatacaggagagcacatatggctcgcgtaaaacgtggtgtaattgcacgcgcacgtcacaagaaaattttgaaacaagccaaaggctactacggtgcgcgttctcgcgtataccgcgttgccttccaggcagttatcaaagctggtcagtatgcttaccgtgaccgtcgtcaacgtaagcgtcagttccgtcaactgtggattgcgcgtatcaacgcagcagcacgtcagaacggtatttcttacagcaaattcatcaacggcctgaaaaaagcctctgttgaaatcgaccgtaagatcctggctgatatcgccgtattcgacaaagtcgcgttcaccgcgctggttgaaaaagcgaaagcagctctggcataagccagtgaaaagagggagcctggctccctctcttttatttactgttcagtgagttgacaattgacctgtaacccttttcaataaaggatattcggttttaccacataaggtaacgcaagcatgaacgctgctattttccgtttctttttttactttagcacctgatcccaggaggctagcgcgtgaaaaacgaaacgaaaaacagcgcaaaaaagcctcctgatggaggctttttttgtatctgaaatcgagagattacgtccaatgaaccggtgtcttcaccgacacaatgaggaaaaccatgtcacatctcgcagagctggttgccaatgcagcggccgccattaaccaggcgtcagatgttgccgcgttagacaatgtacgcgtcgaatatttgggcaagaaagggcatttaacccttcagatgacgaccctacgcgatctgccgccggaagagcgtccggcagccggggcagtcattaacgccgcgaaagagcaggtacaacaggcgcttaacgcgcgtaaagccgagctggaaagcgcagcgcttaacgcccgtctggccgctgagaccatcgatatctccctgccggggcgccgtattgagaacggtggtctgcatccggtcacgcgtaccattgaccgtattgaaagtttcttcggcgagcttggttttaccgtggcgactggcccggaaattgaagatgactaccataacttcgatgcgttaaacattccgggtcatcacccggcccgcgccgatcatgataccttctggtttgacgcgacccgtctgctgcgtacccagacgtctggcgtccagatccggacgatgaaagcgcagcaaccgccgatccgtattattgcgccgggccgtgtataccgtaatgactacgaccagacgcatactccgatgttccatcagatggaaggtctgattgttgataccaacatcagcttcaccaacctcaaaggtacgctgcacgacttcctgcgtaatttctttgaggaggatctgcagattcgcttccgtccttcttattttccgttcaccgaaccttctgcggaagtggatgtgatgggtaaaaacggcaaatggctggaagtgctgggctgcgggatggtgcatccgaatgtgctgcgtaatgtcggtatcgatccggaaatctattctggcttcgcttttggtatggggatggaacgtctgaccatgttgcgttacggcgtcaccgacctgcgttcattcttcgaaaacgatctgcgtttccttaaacagtttaaataaaggcaggataaaacaatgaaattcagcgaactgtggttacgcgagtgggttaacccggcaattgatagcgatgcgttggctaaccagattacgatggctggcctggaagtagacggcgttgagccggtcgcgggaagcttcaatggcgttgtggttggggaagtggttgagtgcgcccagcatccgaacgctgacaaattgcgtgtaacgaaagtcaacgtcggcggagaacgcctgttggatatcgtctgcggcgcgccaaactgtcgtcaggggctgaaagtagcggtggccaccattggcgctattctgccgggcgatttcaaaattaaagcggcaaaactgcgtggcgaaccgtctgaagggatgctgtgctccttctccgaactggggatttccgacgatcacagcggcattatcgaactgccggcggatgcgccgctgggtaccgatatccgtgaatacctgaagcttgacgacaataccatcgaaattagcgtcacgccgaaccgtgcggattgcttaggtatcatcggcgttgcgcgcgatgtggcggtactgaacaaagcgccgctccaggagcctgaaatggcgccggttacggcaaccatcagcgatacgctgccgattacggtagaggccgctgatgcgtgtcctcgctatctgggccgggtggtaaaaggcattaatgttaacgcgccgacgccgctgtggatgaaagagaaactgcgtcgctgcggtattcgctccatcgatgcggtggttgacgtcacgaactatgtgctgctcgaactgggtcagccaatgcatgctttcgataaagatcgcattgatggcggtattgtcgtgcggatggcaaaagagggtgaaaccgtcgtcctgctggacggtagcgaagcgacgttaaatgcggacacgctggtgatcgccgatcaccataaggcgctggggatagccggtatttttggcggcgaacattccggcgtgaacggcgaaacgcaaaatgtgctgctggaatgtgcgtactttaatccgctgtctatcaccggtcgcgctcgccgccacggtctgcataccgatgcgtctcaccgctacgagcgcggggtggacccggcgctgcaatataaagcgatagagcgcgctactcgtctgcttcttgatatctgtggcggtgatgcgggtccgataattgatgtgagcaacgaagcaacgttgccgaaacgcgccaccattacgctgcgtcgcagtaaactggatcgcctgatcgggcatcatattgcggatgagcaggtcagtgatattctgcgtcgtctgggctgtgaagtgaccgaagggcaggacgagtggaaagccgtagcgccgacctggcgtttcgatatggagattgaagaagatctggtggaagaggtggcccgcgtttacggctataacaatattccggacgagccaattcaggccggtttaatcatggggacgcaccgtgaagccgatctgtcgttgaagcgggttaaaaccatgctgaacgacaaaggctatcaggaagtgattacctatagctttgtcgatcctaaagtacaacagctcatccatccaggcgcagaagcgctgctgctgccaaaccctatctccgttgagatgtcggcgatgcgtctgtctctgtggagcggattgttggcgacggtggtctataaccaaaaccgtcagcagaatcgcgtgcgtatttttgaaaccggtttacgtttcgttccggatacacaagccaatctgggtattcgacaggatctgatgctggctggcgtgatttgcggtaaccgctatgatgagcactggaacctggcaaaagagaccgttgatttctatgatttgaaaggcgatctggaagcagtactggatttaaccggcaaactgggtgatatccagtttaaggcggagatgaatccggctctgcatccgggacagtctgcggcgatttatctgaaagatgaacgtattggttttattggggttgttcaccctgaactggaacgtaaactggatctgaatggtcgtacgctggtgtttgaactggaatggaataagctcgcagaccgtatcgtgccgcaggcgcgggagatttcacgcttcccggccaaccgtcgcgatattgcggttgttgttgcagaaaacgttcccgcagcggatattttatccgaatgtaagaaagttggcgtaaatcaggtagttggcgtaaacttatttgacgtgtaccgcggtaagggtgttgcggagggttataagagcctcgctatcagcctgatccttcaggataccaaccgtacactcgaagaagaggagattgccgctaccgtcgccaaatgtgtagaggcattaaaagagcgattccaggcatcattgagggattgaacctatggcgcttacaaaagctgaaatgtcagaatatctgtttgataagcttgggcttagcaagcgggatgccaaagaactggttgaactgtttttcgaagagatccgtcgtgctctggaaaacggtgagcaggtgaaactctctggttttggtaacttcgatctgcgtgataaaaatcaacgtccggggcgtaacccgaaaacgggtgaagatattcctattacagcacggcgcgtggtgaccttcagacccgggcagaagttaaagagccgggtcgaaaacgcttcgcccaaagaagagtaatcagatccaggcataacatccatcagggtgtattgcggcagatacgctgccatcccgaaagtagatcagcgggatgacagcgtatttgtcagcctgaaagatgacccgtataactaaaaaggccgcattgcggccttttttctttcaagtaaaggatacccaccgtaaaatcacgctacctcttttcagctgaatggataacatgctgacttttgcccgccaacaacagcgacgaaacgttcgctggcttctgagcctgtcactgctggtgctactggctacacttctgagcttatgcgcaggcgaacagtggattgcccccggtgactggttaagcgcccggggggaactgtttgtctggcaaattcgccttccccgcacgcttgcggtattgctggttggcgctgcgctggcgctatctggcgctgtgatgcaggcgctgtttgaaaacccacttgctgaaccgggtctgctcggcgtttcgaatggggccggtgttgggcttattgccgccgtcttactggggcaggggcaactgccaggatgggcgctgggactgtgcgctatagccggcgcgctcattattacgttaattctgctgcgttttgcgcgccgccatctctctaccagccgcttgttgttggcgggcgtcgcgctgggcattatctgtagcgcgctgatgacgtgggctatctatttttccacctctttcgatctgcggcaattaatgtactggatgatgggaggatttggcggcgttgactggcagcagagctggctaatgattgcgctcatcccggtactgatctggatatgttgccagtcgcaaccgctgaatatgctggcgctaggggaaacctcggcgcggcagcttggcctgccgctgtggttctggcgcaatttgttggtcgtcgccaccggctggatggtgggcgtcagcgtggcgatggcgggggcgattggttttatcggtctggttattccgcacatcctgcgcttatgtggtttaaccgatcaccgggttttacttcccggctgcgcgctggccggggctatcgccctgctattggctgatgtggtcgcccgactggcactggcgtcggctgaactgcctatcggggtggtcaccgccacattgggggcgccagtgtttatctggctgctactcaaatccgcgcgttagcgcatcggtaaacaactgctttcatcattcgcagtctatgattaaaggctaacgatgaaacccgctattctaccgacatcagggagacaccatgcaaaactcgcttcttaatactcacgttacgacgattgatggagaggtcactacacttgaaaaatacgccggaaaagtgctgctcattgtaaacgtcgcctccagatgtggcctgacgccgcaatatgaacagttggaaaatatccaaaaggcgtgggcagatcaggggtttgtcgtgttgggttttccctgcaaccagtttatggggcaggagccaggcagcgaagaggagattaaaacctattgtgccagcacctggggcgtcacgttcccgatgttcagtaaaattgatgtgaatggcgacgcgcgccatccgctgtatcaaaaactgatagccgctgcgccaacggcagtcgcgccggagaagagcggcttttacgaacggatggtaagcaaagggcgtacgccactctatccggatgatattctgtggaattttgaaaaatttttggtaggccgggatggtcaggtggtacagcgtttttcgccggatatgacgcctgaagatcctattgtgatggaaagcataaaaatcgcgttggcaaaataatgtctcaattgatgcaattaaaggatgtcgccgagagcacccgcctggggccgctttccggcgaagtaagcgcaggagagatccttcatcttgtcgggccgaacggtgccgggaaaagcacgctactggcgcgtatggcggggttaacctccggcgaggggagcatcaggtttggcggagcgccgctggaggcatgggcgacggcaacgcttgcccaacaccgcgcttatcttgcgcaacagcaaaatccgccgttcgccatgccggtctggcattacctgacattgcatcaacctgataaaacgcgaaccgggcagcttaacgaggtggccgatatgcttggattgggcgacaaactggggcgaagcgtgaatcagctttccggtggcgagtggcagcgtgttcgccttgctgccgttgtactacaaattcatcccgacgctaatccggtcggtcaattattgctgcttgatgagccgatgaacagtctcgatgttgcgcaacaaaacgctctggatcgggtattacatcatttatgtcaggcaggaattgcgattgtgatgagtagccacgatctgaaccacacgctgcgccatgcgcataaagcctggttactaaagcgcggtaaactcattgcctgcggccgccgggaagaggtgctcaccccctcttatctggcgcaagcctacggtttgcgctttcgacgactcgacgtcgaggggcatccaatgctcatttcggccacttaagtaaaatcgtttcttgaaaagcaggtaatttcgacgctaaattaataccaaaataaaaacagaggattgttgcggcatgcgtttttggcttcttgttatcacagcattgttcctggcaggatgcagtactcatcgggcaccggcgccaaatgccagattatcagactccattaccgtcattgcgggtctgaacgatcagttgcagtcctggcgcggtacgccataccgttacggcggcatgagtcgcagaggcgtggactgttccggctttgtggtagtcactatgcgcgacaagtttgatttgcagttgcctcgtgatacgcgtgaacaatcaaaaatcggcaccagaatcgataaagatgaattgctgcccggagatttggttttctttaaaaccggttcgggcgaaagtggtttacatgttggtatttacgatacaaataatgagtttattcatgcctctaccagtcgtggcgtgatgcgttcatcgctggataatgtgtactggcgaaaaaacttctggcaggcacggcgaatttaacctcgcagacgatataaattttatagtctatttttaacatatcgccggttgaacttatgacatctgttgtcatcatatataatgatataaccgtagcatttacaaacgtacttttattaaaaacgggcgtgttcacgccctgtgaaaagtacaagattgaatattggtttataatcagagtaagttaaaaaaaggaaccggttcaccggtaaacaagaaaaatgatgacgcttcaattagtatctgaagttacgtctgtttccgtccgtagtgactggatggcgaatagcgccctaaccatgggactggcgtaatgattgcttcacttgatgagctttaccattccgaactctttttccttcccgtcatggatgaaaacgctcggcttgttggtttagagattattgcaacgtttgccgctgaagacggcgccgtgcggatgccgactgagttggtagcgcctcgcctttcggtggaggaacaatactgtctgtttgttgaaaaactggcgttgttagaaacctgtcagcacttttttattcagcataaacttattgcatggcttaatttaccgcctgcaattagtgacttattattattagatagcgaacttttttcccgggcagcgcgctttccgtttcttgaattagctataaatgagaattatcctgggttaaaccagggcaaaaacaatgaaacgttagctaatctggcaatgcatttcccattaatgctggcaaattttggggcaggcgaggcgtcgactaaagctattttcgatgggcttttcaaacgagtcatgttggataaaaattttattcagcagcgagctgaaatgatctcattcgaaccattcatgcacgctattgttgcccagatctcctccagctgcgagtcgctgatgattgccggtattgatactgaggcgatgtttgcgcgcgcagcgccattggggtttagcgcattccagggcggactatggcctccggtgccggtaagccagctcattaaactcgttcagcgataacctttctgtttgccggtgtttaaccggtgattaaccgtctacactgaagacaggaggccctatgaccctgtcttttactgcccgttggcgcgatgaattgccagcaacgtataccgcgcttttacccacaccgttaaaaaatgcgcgactgatttggtataacgacgaactggcgcagcagttagccattcccgcttcgttatttgatgctaccaatggcgctggcgtttggggcggcgaaaccttattacccggtatgtcgcctgtcgcgcaggtatatagcgggcatcagttcggcgtctgggcgggacaactcggcgacggacgcggtattttgctgggcgaacagctcctggcggatggctcgacgctcgactggcatctgaaaggcgccggattaacaccctattcgcgaatgggggatggacgcgccgtcctgcgttcaaccatacgagaaagccttgccagcgaagccatgcattatctgggtattcccactacgcgcgcgttatctatcgtaaccagcgatacgccggttcagcgagagacgcaggaaacgggcgcgatgttaatgcgtctggcgcaaagtcatatgcgttttggtcatttcgaacatttctactaccgccgtgagccggaaaaagttcagcaactggctgatttcgctattcgtcattactggccgcaatggcaggatgtcccggaaaaatatgctttgtggtttgaagaggtggcggcgcgtaccggaagactcatcgccgagtggcaaaccgtcggttttgcgcacggcgttatgaatacggataacatgtcgattctggggctgaccatcgactatggtccctttggttttctcgatgactacgatcccggcttcattggtaaccattccgatcatcagggacgttaccgcttcgataatcaaccgtcggtggcgctgtggaatttacaacgtctggcgcagacgttaaccccttttattgagatcgacgcgttaaacagagcgctggatcgttaccaggacgcgttgttaacgcactatgggcagcgaatgcgccagaagctgggcttctttaccgagcaaaaagacgataacgttttactgaatgaattgtttagtctgatggcgcgcgaagggagtgattatacccgtacatttcggatgttaagccatacggagcaacagagcgcctcctcgccgttgcgggatacgtttatcgatcgcgcggcgtttgatgcctggttcgatcgctaccgggcgcgattgcgcacagaggcggtggatgacgcgctgcgccagcagcagatgcaacgcgtgaatcctgcgattgtgttgcgcaactggctggcgcaacgcgcgatagatgcggctgaacagggagacatggcggaactgcatcggttgcatgaagttttacgtcaaccttttaccgatcgagatgatgactatgcccgccgaccaccggagtggggaaagcggctggaggtcagttgttcaagttagcctgatgccagcagcatcgtctgctggcggagcgctatttggttaacagtagcttcccggcctgagttttgcgcaacagatactcctgaccgttgtgatcgataatgactttgccgtccggacctaatagcgcctgactgttgacgcgccgttcagcggcagggagaagcgtttcattgtctatttccttagggtgaggcagctcggtgttatccatacgcgacatgctatttattaataatcaaactcacaatgattattattatcaataattaatgcgataacagcaagtgctaattctgcggagtgatatacgcgcgcggagagaaaagggcgggtaacgcatcgaagaaacgcccatcccggcaggatgggcgagctattaaaagcggctgtctaccgccgcggcaagtttttccaacaaaacttccgtatcttcccagttcaggcaaggatcggtaatggactgaccatagattaatggttgaccgctgataattttttgcgtgccttcccgtaaaaaactctctgccataatcccggcaattgccgtggagccattacgaatctgctggcaaatatcatcacatacctctaactggcggcgatgctgtttttgacagttgccgtggctgaagtcgacgaccagatgttccggcagatcaaattcatgcaacgtatcgcaggcggcggcaatatcttcagcgtggtagttcggttttttaccgccgcgcatgatgatgtgcccatacgggttgccactcgtctggtagatagtcatctgtccgtctttatccggcgagagaaacatatgactggcgcgggaggcgcgaatagcatcaacggcaatgcgggtattgccatccgtaccatttttaaagccgaccggacaagagagcgcagaagccatttcccgatggatttggctttcggtggtacgcgcgccaatcgctccccaactgatcagatcggcaataaactggccggtgaccatatcaagaaactctgtggcggtcggtactcccagttcgttcacctgcaatagcaagcgacgcgccagttcaagcccataattgacgcggtaactgccattcaagtcgggatcggaaatcaggcctttccatcccacgacggtgcgcggtttttcaaaataggtgcgcatgacgatctccagacgcgcctgatgcttttggcgttgtgcctggagctgcgtcgcgtattccatggcagcattcagatcgtgaatcgaacaggggccaatgacgaccagtagccgtggatcttcaccatttaaaatcttttctatccggcgtcgggagtcggtaacgtgactggcgacggaggacgatacaggataccgctgcgcgagttcggtcggtgttaccaggctgtcgatacgcgcagtacggagttcgtcggttctgttcattacaagtctcagaaatttgttgcttcaacggcaggactaccgggaagtgatgggcatcacgataaaccaatccctgctgatttcaagtgcgaggcgtgtcacacctcgcaggcagaacggcatgataacaaaaaccaacccattaaactagtttgctagtacatcctgcggttaagccccataatatcgagaatcttggtggctatctcttcaacggaataattagtgctgttcaggcaggggatctgattcttacgatacagcgcttcgacctccgccacttccatgcggcactgacgcaacgaggcatagcgactgttttcacggcgttcttcgcgaattgccgccaggcgttcagggtcaattgtcaggccgaacagtttatgttgtagcggttttaacgatgtgggcagcgtcaaattatccatatcatcggcgatgaaagggtagttagccgcacgaataccgaattgcatcgccagatagaggctggtgggcgtttttccacagcgcgaaacgccaagtaaaatgacctgagcctgatcgaggttgcgcaatgaaatgccatcatcatgcgccagggtataatcgatagcggcaatacgggcgtcatacttgttcaggttacccggattaagcccatgagtacgatgagcgatcggcgtcggatccagtttcatctcctgctgaagcggcgccaccagcgcctggacgatatcctggcagaaaccttcgctctgtaagatgatggcgcgaatttcaggtaaaacaatcgagtaaaacaccagcgggcgaacgccggtttgctgataaatggcgtcaatttggtctttgacggcgcgggcgcgactttcgttttccacgaatggcagcgtgatgctgctgatcgtcaccggaaactgcgacataaccgcgtgacccaggacctcggcggtgatggcggtaccatcagaaatatagaaaacatggcgatcaacaacattatccattctgttcatcctgaagagtaaacataattatctgaaagcataaattaaaagtaacgggaaacgtataacttgtcgcttattttataaaatgacagggactttttataattaatgaaaagtgtgtttcatttcctggaaacgcagtttataccgggggttattcagggaatgccgtgctatgcgcgggtttgcgcaactacgtaaacaatctgaaaaaatgaaaaaataaatttgcttgaacgattcaccgtttttttcgcgggtttaagtatgccaggataaatacgcaactatgtgtttcttaaactcgttcatttatcacaaaaggattgttcgatgtccaacaatggctcgtcaccgctggtgctttggtataaccaactcggcatgaatgatgtagacagagttgggggcaaaaatgcctccctgggtgaaatgattactaacctttccggcatgggcgtatccgttccgaatggttttgcaaccactgccgatgcgtttaaccagtttttggatcaaagcggcgtaaaccagcgcatttatgagctgctggataagacagatattgatgatgtctcccagctggcgaaagcgggcgcgcagatccgccagtggattatcgacactcctttccagccggagctggaaaacgccatccgcgatgcctatgcgcagctttcgtcggatgatgaaaatgcctcttttgccgtgcgttcctccgccacggcggaagatatgccagatgcttcgtttgcgggtcaacaggaaacgtttcttaacgttcagggcttcgacgcggtgctggtggcagtgaaacacgtatttgcttctctgtttaacgatcgcgccatctcttatcgcgttcaccagggatatgatcatcgcggcgtagcgctttccgctggcgtgcagcggatggttcgctccgatctcgcctcgtcaggggtgatgttctctatcgataccgaatccggctttgaccaggtggtctttatcacctcggcatggggactgggtgaaatggtggtgcagggcgcggttaacccggatgaattttatgtccataaaccaaccctggcggcaggccgtccggccatcgtacgccgcaccatggggtcgaaaaaaatccgcatggtttacgccgccacccaggagcacggtaagcaagtgaagattgaagatgtgccgcaggaacagcgcgacattttctcgctcaccaacgaagaagtgcaggaactggcgaaacaagcggtgcagattgagcagcactatggtcgtccgatggatatcgaatgggcgaaagacggtcataccggtaagctctttattgtgcaggcacgtccggaaaccgtgcgctctcgtggccaggtgatggagcgttatacgctacatgcgcaggggaaaatcattgccgaaggtcgtgccattggtcatcgtatcggcgcaggtacggtaaaagttattcacgatatcggcgaaatgaaccgtattgagcctggcgatgtgcttgtcaccgatatgaccgacccggactgggaaccgatcatgaaaaaagcggcggcgattgtcactaaccgtggcgggcgcacctgtcacgcggcgattatcgcccgcgaattgggcattccggcggtagtcggctgcggcgacgccaccgaacgcatgaaagatggcgaaaaagtaaccgtctcctgcgcagaaggtgataccggttatgtgtatgccgacatgctggatttcagcgtaaaaagctccagcgtagataccatgccagagctaccgctgaaggtcatgatgaacgtcggcaacccggacagggcatttgactttgcctgcctgccgaatgaaggcgtaggtctggcgcgactggaattcatcattaaccgtatgattggcgttcacccgcgtgcgctgctggagtttgacgaccaggatgccgcgctgcaaaacgacattcgtgagatgatgaaagggttcgactcgccgcgtgaattttacgttggtcgactgacggaagggatcgcgacgttaggcgccgccttctacccgaaacgcgtcatcgttcgcctgtctgactttaagtccaacgaatacgccaacctggtcggcggcgaacgctatgagccgcatgaagaaaacccgatgctgggcttccgcggcgcgggtcgttatgtcgcagaaagtttccgcgattgttttgcgctggaatgcgaagcggtgaaacgcgtgcgcaacgatatgggccttaccaacgtcgaaatcatgatcccgttcgtgcgaacggtcgaccaggcgaaagcggtcatcgaagagctggcgcgccaggggcttaaacgcggcgagaacgggctgaagatcatcatgatgtgcgagatcccgtccaatgccttgctggctgaacagttcctcgagtattttgatggcttctcgattggttctaacgacatgacgcagctggcgctggggctggatcgcgattccggcgtggtgtctgaactgtttgacgagcgtaacgacgcggtgaaagcgctgctgtcgatggcgatccgcgcggcgaaaaaacagggcaaatatgttggaatttgtggtcagggtccgtccgaccatgaagactttgccgcctggctgatggaagaggggatcgacagcctgtcgctgaacccggacaccgtggttcagacctggctgagtctggcggaactgaagaagtagtgtaataccggatggcggcgttaacgtcgccatccggcaatttataccgcagtgtgctcctggcgcagccgctcaataatatcctgccgcaacagaaacttctgcactttgccagaggcggttctgggcagtttttctacgatgacgatccgttccggatatttatacttcgctacccgttttcgactgaaaaaagcgatcacctcttccagcgtcagcgaaaggtgtggcggttttaagactacatacgcgcatgaacgttcgcctaagcgttcatcaggcatagcaacgacgcaagcatcgtgtatgcgggggtgttgcaataaaatatcctccacctcgcgactgctgatattttcacctccacgtataataatatcctttttgcgcccggtaattttgatataaccgtcttcatccatgcggcagaggtcgccgctgtaataccagccctcattatccagtgcgcgggcggtaagttccggctcgtccaggtatcccataaaaacgttcggcccgcgcgaggcttcttcgccttcgtggcctgctggaagcgtattgcgatcttcatccacgattttaatttctacaccggtggcggcataaccatcggtgttcatcatgcgtgaagtcgaatcacccagattaaccatcgagtgtggagaactttctgtagaaccgtaaatactcaataatttgataccgcgctgctggcagtcgcgggcaacctttttgggaatagtcgtgccgccgcataagaagaatcgtagtgaggagaggtcggcaggctgttgctcaatggcacaaagcagatcgtaaataaacggcgtcgcgcctgacatacaggtacagcgttgctgcgctaataaggtaaggcaggcttctggggtaaagatgtccagcaatacgctacgcgccccgattaaaaagggcgcggtgacgccgtgtaaaaatccggtggcgtggcccagtggcgcaggcatcaggaacacatcttgccaggttaaattcaaccgcgcgcaatacgcccgttcgctggcaagaatattattgtgggtcaacatcacccctttcggcattccttctgtgccggaggtaaacagcactgccgccagttcatcaccgtgaatgttaatgtctgactgcaacggttcgctgcggtcgatgatttgactaagcgcaagcgctgtggtggcaggcgccagtttatccacgccgacaatatgcgtcagatggcgcagttgattttgtagcggaaggataagatcgaccggacgattctgtttgaacacggtgggggcgaagaatattttagcctgacatttgttcagcacccaaaccagctctgcttctcgccaggcgggaagtagcgggacagataccgcgcccgttttcaggcaggccagataaatgagggtaaactcacaccagcccggaagctgaaaggccacgcgatcgcccggttgaatcccctgagacagtaaccagtttgccaggcggcttgccgcgtagtcgagcgcggcgtaggtccaggacgcgccatgattatcgaccacggcgattttatcgggtacggcgcgtgcggtttgccgccagtagtcgcccagtgaagcatcgccccagtagccggactcgcgataggttttccgccttgcggcgtcaaacgttaatgtaacactcattgacttgttctctattaatacaaatgacgtaatctccgggggcaagccgaataagacgccgtagcgtcgttatccggtgtttcagagcgtcagccgtagcgaaactcaacgccgaacgttcccgccgggtattcccatttttcgagaagagtattgccgcagagaaccctgcaggtcccgcattccaggcagcccgcggagtcaaaatgaatatttcccgcatcgtccagcttatagagtccggcagggcaggcttttattaatttattaaactcctgcatgtcaggcgaggagcgcaaaatgatatgtgggtgtccttcatctacgtaaaatttatttacgcccaatttgacgtcaacattcaccttattgtccgaactcataatgccgtagccccttttatgccgtcttttaatagattcaccagtccaatttttttcgcatgtgacaggatagttttacgcaacggtgggactggaccgccatcaacggtgaacagatcgcccacaatgtttgccgccatacgcgggtactcggtaaaaagccgtgggttttccattaatccggggagtttgcggaaatgccgcatatcgcgtaacacgccgtttttctccagcgcgcgtttgtaaccggcaagactcgcggcggaaaaatcttgccgcgctttagcgtcaatggcggtttgagcggccgcttgcgcggacgcgatggctaaatccatgccgcggacggtatagccgagattcagacaaagaccggcggcgtcgccgacaatcatcacgccgtcatttgccagctccggcatcattgctatgccgccttcgggcaccatatgagcggagtattcaagcagtgttcccccctgaatcaaagggcgtattgccggatgctgtttaaaatcttccagcatttgcggtacgcttttggtcgcgtgagcaatgtcgcccaggccacataccagccccagagaaaccgaatcgcggttggtataaagaaacccgccgcccatgagcccgttggagggcgcgccagcgaataaccaggcggcgccttcatgggacgccagattaaagcgctcttcaataagtgccggagagagcccaatcaactcttttacgccgactgcatagtgatgcgcagaagagacaggcaccatgtccagcgaacggcccagcatggaattcacgccgtccgcgagaatcacaatattcgcatccagaatatcatccccggcctgaacgccagtgacgcgattgccttcacgtaccagagcgtcgacccgtacacctgggataaactgcgcgccagcctgttccgcctgcgccattaaccacgggtccagtttgttgcgcagtacggtatatgacgtaaggggcggagtagggggcgcgcggtgaaaatcaagtgtgacggcgctttcttcggttaaaaaggagattttttcacgggtaacgacgcgttcgatgggggcggacgttgcgaatcccggcataatactttcgatactgtgagcgtagagccggccaccggtcatatttttgctgcccgcgctgtttccgcgttcaataaccagtacatccagtcccgcttttgccatcacatacgcggcgaccgttcctgctacgcctgcgcccaccacaatagcgtcaaatttatcatccgacatgctttatgctcctttcccgccgtatcgacgacgggagatgtgcgttgaaaaaggaattagcggcttaactggtcgatgagggcaggaacaaccttatagatatcgcccaccaggccataatcggcataattgaaaatgggcgcgtttttatctttgttaattgcgacaataatttttgcgccgtttccacccaccatatgttgaatttggccggaaatgcccagcgtcagatagagatcggatttcaacagaacgccggatacgccaatataacgctcacgttccatccagttttcaccttccgcaatggggcgggaacagcccacttctgcgccgaggacggtcgccagtttatgcaccatatccagatcgctttgcgccgccagacctcgtcctacgccgatgacccgtttggctttgctcaaatcgacgctgcttaacgatttcgcgcgccgctgctggcacaatacctcgtggcgtggggcaatatatgccagcgtggtctgcgggcaagtatgaccggggagaggggcggcgggttccagtacgccgggtgccagcgtaataatcgcctgcggactgtttaatttctctttgccgaaagcaagtccgccgtacatgcgatgctctgcgtgtagcgtcccgtcgaggaggtcaatagacgtcgcgtcgttcaccatcacggcgtcaagctggatgctcagccgggcgcccagcgctttacagcgcttggtcgccgccatgagcagcagcccattttggtcgcctaataacgaggccagcgtttcggcatagttttccacgcgctgcaaatccgtatgcgattcaagaatgactatctcatcagcgccaagcgctttcacgtagtcgatatccgtgtttccttgcacgatggcgtaaactttttctccccactgccgcgcgccggtcattaattcggcataacgctctacgttatcgctaaatacccatacgttagctaaatgattcatgataatttttctccgttgggcttagttcagggattttttcaaatggtcggccagtgcggtaatggcttccggcgaatcgttatcgagaatgatatgcttgcgttctgtctgcggcggtaccgagatggcgaccagttccgccattggcgtggttggggtccagtggatatcgctcgccagccacgacgtaacggcttttttcccggcgccgagaatggctttcattgacgggatgcgtggaacgttaatatctgaggtcacgcaaagcaccgcgggcagcgtgagctcgataatttcaacgtcttcttccagtgtgcgttcaacgatgattttgtcgccgtcgcgttgaatatggcttactgcgttgatgacggggagtttcaggagttcgccagtcagcaggcccacctgttgggcataaatatcgccggagccctctccaaagagcaacaggtcaaagccgattttctccgccgcggatgctagcgccagcgcggtttctttgggcagggcgtgctccatttgcgcatcctgaaccatgaaaagcgcatctggcccgcgggataacacatctttgcggacttttgaattttgtaacagagagccgccgacggtgagcgcggcgatctcgtcgccaccgccagctaactgcgcggcggcctcaattgcatttaaatcaaactggctgattttggcctcggcacgatcaaaattgagcgaatgctccggggtcacggtaatgtcctgttcttcaggcaccaacttaaagcaggttattattttcattgcatctccagtgagtcgcgtgcggataagtaacgtaaatctgactgaaaatagtctgcggcagtctgaagaggtttacgatgggtcaatctgttttccttgccaacaatcttgcacaaaaaatctgcgaacagagaatcgttagcaaccatctgaaaagggcgtcataaaaatataaatacggtagtgagaataataagtgcgaagcatatcatcattttttaacatgaaacgtgcgatgttgtttctgtgaggttaaaagaaaacatcaaagatatgtcggctatgtatttttgtctgataatacgctatcgacaggtaatctgagctgtctgcaaaagaacataatatcttgcattcggaacgaataatcttgttttgctggtaatctccacggttgtacaacactgacgctcgctttattttatcctggttatctttttaaacctgacagaggttattatgtatcagcgctgttttgactccgccgcggagacgatttttgaacaggacaagacccctcgattttcacgttttgtcattagcgatgatccaaactgggagtctggccatcatatgcatgataatgaaacagagcttatttacgtcaaaaaagggatagccaggttaattattgactcttcactctacgtcgcgcatgcggacgatattgtcgtcgttgagcgggggcggctacacgctgtagcatccgacagcaattcgccggctaccacctatacctgtgcgctgtatgggttttgttttccaggttgggaagaaaaccaactattgcagagtcattcctgtccggtggtttccgtggttcagggaaaaggggtcattaaaagtatctttaatgaattaagcgtgttacttccgcaggggaaaaacgtattggcttcctctgtatacgatgcatttgcttacactctgaccgcactttactatgaaaattttaaaaacgcctatcgttctgaacaaggttacattaaaaaagatgtattaattaaggatgtacttgtttatctcaataataattatcgtgagaaaatcacgcttgaccagctatcgaaaaaatttcgcgccagcgtcagttatatatgccatgaatttgccaaagaatatcatatatcccctatcaactatgttattcaacgacgtatgaccgaggccaagtttgcgctgacaaacactgagtcgccactggcagaaatttcatggcgggtaggatatgaaaatgtggaccattttgccaaattgtttatgcggcatgtaggatgttctcccaacgattatcgtaagcaatttaaaaatagtctggttgagcaggcgtatttgctgccaaatacctgacggcgaaatatatctgatttattcggcctgatgccgtaaagcagtcaggccgaataagacgttccggtacgatccttacttgttctgatagtctttcagaatctggcgtcctgccacatagatcataatttcatccgtgccgccaccgatacgttcgcagcgaacatcgcgccagaagcgggagacacgggcttcgtcagtataaccaagcccacccataatctgaatcgcatcgtcaatcacttccatcgctgtgcgtgcgcagtacagcttagccagcgcggcgctggtacgcagtgactcttcccgatcggcctgccaggcgactttcaacaccatattgcgcatgttttcgattttgatggccattaacgccagcttttcctggatcatctggttatggccgatgggtttaccaaaggcgatacgctggttggcgtaacgggcggcatcttcaaatgcgcattcggcgaaacctgtactgcgcgccgcattaatcaaacgctccatctcaaaattgtacatgacattgaggaaacccatgccttcttcaccgacccggtcgctttcgtccacctcgacattatcgagataaacttcgcatgtactcaacatgtgccagccaattttgtgcagcggattaatctttatgcccggtttatttgagtccacccaccaaagcgtgaacgcttttttaggatcttttggctccgtatcgcgcgccagaaccagcatgtaaggatattcttttgcaccggtgataaatgttttttggccgttaagataaaccttgccgtttttacgcgtccaggttgttgtggcgctattattatcagagcccgcgccaggttctgttaaggctagcgcatatgctggatcgccggtggccagagtactttctgctgttttacgcagttgttctgcggaaccaaaacggcgcatactgtgaatgcattggccgttggtaatcaaaaaggccggagcgccgcattttgagatttccatcagcgccagcatttgcgttacatagtcagccggaatgccgccgaattcttccgggacgcccagcatcgaaataccgttttccgccagcgcctgcataaattctttgggataggtgcccgtttgatcgcaggtacggaaatactcttccggaaaattgctggtgattaactcgcgaatactggccagtaatagttcttgttcttcagttaatgaaaaatccatatttgtactccttttaatgtgttgcgtcaggaagcgtgaatcccatagtgctatcggtaaataatcttgtgtccatcagttttaaatctggtgagataaccggtgaaaaatccatcttgtcaagaatatcccgttgcagatcgacgccaggcgcaatttcaattaaatgcaggccatcttgtttgagagtgaaaaccgcacgttcagtgatgtaacgcacgtctaacccgcgctcaagcgcaatttttccactgaacgtaatttccggcagttcgctgacgaattttttcacgcgaccttcctgcagaatatttaatttgccatcggtaatttcagtttttaaacttccggccgtcagagttccgcagaaaataattttttgcgacgttgcgctaatatcgataaacccgccggtgcccataattttgccgttgaatttatgtacaccgacattaccgtgttgatccacttcggcaaaacttaaatagcagacatcgagcccaccgccgtgataaaaatcaaattgtgaggtcatatcaaggatcgcgcgggtgttgacattagcgccgaaggccacgccctgagaggtaataccgcccaccgggccagtttctacggtcagcacgaagtcatcggcgcagccttcctcgcgagcgaccagaccaataccgtcggcaatgcctacgcccacattgcctaccgcgcctttacgcatttcaaacagcgcgcgtcgggctaccagcttgcgctgattaaggggtagggtaagctgcgtactatcatcaagagtgaaatccccggagataaatcggttcaccggcgcgccgccatagagttgcgtctggtcggcgtcgacaaccacaatatccaccagatagccgggaatacgcacggattttggatgcagcgtggctttttttaccattttctgcacctgcatcattacaataccgccattattgtgaacggcctgggcgatcaccagcgcatcaagatacatcacctcatcttcaaatgatgcatagccttcgctgtcgcaggtggtggcgcggataaaagccacattaggcgctatcgctttataatagagatattctttattatcgatctctaccagcttaatgagatcttctttagtcacgtcgtttaattttccgccctgttggcgagggtcgacaaaggtaccaataccgatatcgctcagaatacccggctggtgtgcggcgctggcgcgcagcgtctgggttaatacgccttgtgggtagttataggcggcgattttattttgttcagccagttcagaaatacggggagattgcccccaatgtccgcatagcgcccattttaccagtccctcctgcgccagcgggctgatgccgcgatcggcgcggtcacctaatccggtagggctaataatagataaatctcgtggtgactggggtgtttgatatttatctgccagtgcggtaattaatgttgtcgcttcgagaataccgccgcctgcgcccagaatacataaagtggcctcatctggaatataatttactgcttcttgtgcagagagcacgggaacgcggccattaatgcgtgatggcttattgattttcatatttactccactattatccctgaaaacaatatcgatataaccgtgttaaggtaataaagacagcggctttcaatgaatatggaacatattcatgtcagataactatttattttattgtggcagaaagagaatattccgccacacgataaagtattacgcctggtgcaatatagttaatacggtacgcagatcggctaccgatatttgtcccggcgcagatgcttttttcaccgcgccaaacgttgccgcagaaccgaacacttcgccggcaagacgagatattaccccggttttcgacatcgacatggtaataatcggacgatccgcatagcgctcctgcatttctacagtggcggtaagtaaggtcaggacatcggctttagtctgtggcatgacggcgatcttcggaatatcagcgcccagttcctgcattttacgcagacgctgaacaatctcttccgctgcgggcgttttatgaaaatcatggttagacatgatcaccgcaacattgtgttgatgagcatagccgacggtggctttcacctcatcgtcgccggtaaaaagctcaagatcgatcatatcgaccagaccgctgtcaaccgctgcacgattcagatcgatatactgtccggtggttagcgcctgttcgccgccttctttcgcgctgcggaaggtaaatagcaagggtttatcggtaataatctcccggatggcgccggcggcctcaagtacgctttccgccgttgtcacgttggcaaaatggtcaacgcgccactccagaatatcgaaatccgcttcacggtaggcgagtgcttccgatttcacatcggtaatggtttttcccattagcgacacaatgatctttggcgcgccttcgccaaccacgagatctcttacagttacggttttcatttggtacccttcattgtcattcgtcgcaattataattttaccggtcaggctgtgaatcccatcacctgctttacatagtccaatggaaacgcttttcctgtccacagttcaaactgttcggctccttgccataacaacatgccgtaaccatcaattgttttgcaaccagcttgttgcgcctgctgcaataactttgtcatatgcggattataaacacattcggtgaccagcaattcagggcggagcagggaaacatcgccgatcagggattcgttctccaatggtttcatgccaactttggtgccgttcgtcagaatatctgcgctggcaagcgcttcagtaaaagcgtgctgatcggcaagatcggtgacggtaacgacacaatcagtgttttcattcacccgcttcgcaaaggcaaccgctttttcgaaaaagtcatctttacggttaaacagtttaatttccttaatgccttcaatagctgcctgggcgccaatggcggtagccgcgcctcccgcgccgagcagcaccatggtttttccccgcatatcgaaaccgctttctttaattgcccgaatatggcccgtaccatccgtgttgtagccgcgtagatagccgtcatcgttaacaatggtgttgatagcgccaaccagttttgctgctggcgttaattcatcgacatactcacacgcgagctgtttgtttggcatggagacgcccgtaccgcgcatttttaatgctttcagtccttcaatggcgctggcaaacgtcgtgttatccacttcgaaagccatataggtatacggtagccccgctttttctaacgctttgttttgcatttcgggcgataagctatgacggataggatacgccataagaccaattaattcatattttgcggtaacatccattttatactccttaataagtggacagtgcagagcagggcgcatgcctgttgcgcatcgttaacatttttactggaaataatgctcgccaaatcggacatcgttttgcgggatcttaaatacgcgataatagcgaataaatacaataatggcggtgataaatgtcagtagtgcaaaggcaaaatctaacaaaatgatatattgcaggccaatagtagagagataaccggtaatcagtgggataagaaagttagctacgccccccatcatcatatatatactggtgactttagctttactcttagggaaaaattccgacattaccgatacgcctaattgtaaaatacctccagcagcggaaaaaccaatcacgaaggcgccagcattacagatcagtggagagggatacaggtaaattgccgcagcggtgattgtcgccagcccggcattgaaaacattggcccagatggggcgaaccatttttttcagcaatgcggcaaaaataaacacgcaaaccaacgatcccatactgtaataagagatggttttcagcgcgtcggattccgccattccggcgaaggccatcgcatatttaggcatccagaccacaatcacatagaaggttgagaacgcggcgacgccaaataaaacggaagctacgccttccagccagacgaggggagtactgttcatctggggtaattctttcgcaatactggcatcgacaagttggctgggaaaacggcttttcaacagcatcaacgtgatgaggacgaaaaggataccggggattaccaccgcgtagccgtaccagatatggttgactagcaaggcgctgacgataaggggataaatcatttgcccaaaagagaccatcgctttaaccagaataactgccgagcccgatgctttgggaaaacactccattaatgcagggtatccgccggtatccagcgcggagttcgccacgccgacacacaccgctaatatgaaagcgatcatcaggttaggactggcgggaataccgaagaaaaacagcatatatagtacggcgccaagcagtattattgcccgacggccaaatttatcggacagtacgccaaagaataaaatactgaccagacgaccaagaccaatgccagagattaaataggcaataccggcactatccgtggagaatttctgtgcaagggaggtcatgttctgggctagtgtaataacactcatgccgtggagaaagtaactaaaataaatgcagataacagccagcaaatatggcatgttgcgagccttgttctgagacatttgttcacagctccttgctgatggtttgattcaatgtcctgcttattactgctttactacatgcagcgattgttcagtaacactataagtcggtactgtcgttatatgtacataacatggcgtttaaaatgccaggtttattgcattgatagcatttcatttgttagccaggaaatataaaaattgctgcgaatttgttgtttaatacatataactcgtgatgctcatcgcaatttttctgataagtgtgaagataatgaataataattaacacgaaaattacattttttgtttcccggtgataatggctaacgttttattttgcatagcaaggcaataatattgcaactggcacgctaacatttattgcgcggttgacgctgcttcagcgtgatgttgtgattcagcccgacttcggtaaccgatgaacagtgcgaggagaaatcccactgcggcgataccggtatcaaaccacataatatgtgcaatgctcatttctgaaatccgcgctgtgatcaacggaatagtgaacgtcgcgatactgccggcgctgtaataaataccggtcgctttacctttctcctgtggaaaacgggacgccatcagcgtcaggccgatttgtactacgccaccggcggaagagaatccaatgacgaatgcgaagatcataacaatataggtctgaggatgcaggcagaccgtcagaagcgcaataaaagagataaaggtataaaacatcaataatgtggtagagcgaattgtttttctgaccagcggggcggtaataaaaacgcagagtagcgatccgcaggtataaatacttaacagtttgatggattgggtatacgacattcctgcgacgaactgtccatactgcgccagccactggctgataagataaaaggttgccatcgagatatagccataaagggtgtagctgataagatcgatgagggagcaatgatgtacgcctgtgactggcgcttgcgagattttgggcttcaatatccgaccaggatagggtggaaaagggcagcgtaataaaaacagagcattaataagcatgatcgccccggcaagcaggaaggaccagccaaaccacatattagcccagactaataaactgataataatgggcaacaagaattgcccgccagagacaaatgctttgatcagaatatttgccgtactgggggagcgagggaaggcttccatcaaactgggataggtacctgcatctaaaaaactgttggccatacccgctaaaaagccacaggcataagcgacaaaaatcgtctgagcataaagaatgccaatgaaaaaaatcaggtaacaggtggtccccagaatgataaaaggacggcgaccaaagcgatcggaaagcataccggcgattaacaaaacgcttagccggccaataccaagcgaagagatcacaatagatacgcctgcggcactggtatgccattgctgttcaagcgatgacatgttcaggctcatcaggataacccccatgccatgtacaaagtaattaaaatacaaccctacagcggtagggaaataacgatttttcatattatctgactcagagatgccgcctgaacgttacagtggtatacacaggcaggaagcatattggatagggtgacaagtcaatgtcgtgattgtgtggctttctatccggtatcaatacgatgcggcgataaagtttacgtctaacacagccgctccagatcatgtgcgaaaagttcggcagcaacagattgataaattttccactcgataaaatccccctctgtataaatggactgaaaagaagataaatcagggaagtaacgcattgtattattgccgatgcggttatttattttgtcaacaatggcgttaattcgtcgctgtctcctggctttcatttcctttagcctggcaatgatttctggagagatgggtatgtcgccagcttcccatcgttgccaggttgccgaattattatcctgggtgatatagattgtgcattcttcaatcgtcatatcaaaaatacgccgtagtgcttgtagttctaacgcgttcatcattttttaggcttttatatgaaaaaagtgatgctataaatagcaccaccgacaccgtttcgacttgaacagaatcacactattttgtgcaatattatttgttcgttgcagatatcgcggtgttgaaggaaaacgggagctggcttatgtaacaatgcggcgaaaaaagttaaaaaaaaagcccatcgtaggagacgggcaaagactacacacagcaattcgttgtttcactcaggggatttccatgcttataaatcaatgtgttgatttataaccgtgtgctaatagtaggcatgagcactttttgcgtcgatcagattcgtctcaatagtttaaaaactgtaacggatttgcgacagaaatgagatgcggcggggaacagacgggcgaatcaaaatggagtgtgcgttgaattgataaacgtcgctaaagcatcgggcggcaatgccgcccgacgggattatgactgcttgttggcttcctcgatatcatccagctcttcaaggatctcctctggttcattcgtcggcgccggaacttcatgtacccatgcggagaacaaacgccaggtcacggccagaagcaccggtccaataaacagaccaatcataccgaatgcaatcaggccgccgattaccccggaaaggatcagaagcagcggtaaatcggcgcccatgcggatgagtaccgggcgaatcacgttatccagagtgccgacgacggcgctccaaaccagcagcacggtgccccaggtggtgtcgcctgtccagtaaagccagataatggctggaatcaataccggcaacggccccaactgaaccagacacgaaaggatcatcactaccgtcaacagagtagcgtaaggcacgccggaaatcgccagcccgacgccgccaagtaccgcctgtaccagcgcggtgaccaccacgccaagcgccacggcgcggatcgcctgggcagccagcagaaccgccgcatcgccgcgtttagccgcgagacgacaggcaaaatggcgtatacccatcgccacttgttcgccgcgccagtaaagcagggcgctaaacaacagcatcagggcgcagtgcatcataaagcgtccgatatgcgccgcctgaccgacaaaccaggtcgtggttgtgccgatataaggccgcactttcgccataatagcgctaccgcccatatccagcaggctatgccatccggcatacagtttggcgccaaccaacggaatattatttaaccatgccagatcgggtagcgtcatatcgccgccggtcactgcatggatgagcgggccgctaccatcgacaatgctgttcaccagcaaggcgacgggaataacgaagagcagcactaacagcagcgtcatgaccagtacggcaagcgagcggcggccccacaatattttttgtaatttcagcaaaacgggccaggtcgcgataacaatcgtacctgcccatgcaaaccccaaaataaaaggctgtactatccacaaacaggccacaatcatgatggctaaaaacagcaccgatagcagcacttgcgcaatatccctgggctgacgaacatttaccataaatacttttcacctttgtctttgcgccagaacgttggcgcgacgtgaacatgcaaaccacaccctataatgatgagcaatttcagcggtttttaacaggccgattctgcatgtaattctgttgggcgcacaggaaaaaaatgtgatacaacaaataacgcaacacgcaaacgattaagcatcccttcctgtgcgtagaccgctcgcgctcgccgggttgggcgccaccgttcacaacatagaccgcaggaaaaggtcaatataatgattccacaaatttctcaggcacccggcgtcgttcagctggtgctcaattttttgcaggcgctggagcagcaagggtttacgggcgatacggcaaccagctatgccgaccgtctgacaatgtcgaccgataacagtatctaccagcttcttcccgatgctgttgtgtttccccgttctacggcagatgtcgcgcttcttgcccgtctggcggcggagccgcgctttacgtcgctgatatttacccctcgaggcggcggtactggcacgaatggccaggcgctaaaccagggcattattgttgatatgtcccgctatatgaaccgcattattgaaattaatcctgaagagggatgggtgcgggtagaggcgggagtgataaaagatcagcttaatcaagcgttaaagccgtatggctatttttttgcgccggaactttccaccagtaatcgcgccacgcttggcggtatgattaataccgatgcctccggtcagggttcgctggtctatggaaaaacgtcagatcacgtcttaggcatacgggccgtattgttggggggcgatatccttgacacgcaatcgatgcccgtagagcttgcccggacgctgggtgaaaacacgacgacgccaggccgcatctatcagaccgtctatcagtcctgcctggaaaaccgccaacttatcctcgatagctttccaaagctcaatcgcttcctgacaggctacgatttacgccacgtctttaacgatgacatgacccgcttcgatctcacccgcatcttaacggggtcggaagggacgctggcgtttattactgaagcccggctggatattaccccgatacccaaagtccgccgtctggtgaatgtaaaatacgactcctttgattccgcgctgcgtaacgccccttttatggttgatgcgcgcgccttatccgtcgagacggtcgattccaaagtccttaacctcgcgcgggaagatattgtctggcactccgttagcgaattgattaccgatgtgccggataaagagatgcttggcctgaatatcgtggaattcgcgggtgacgatgaagcgcttattgacggacaggtcgaggcgctgtgccaccggctggatggcctgatggcgcgagcggaagcgggcgtgatcggctggcaactttgtaccgatttgacgggtattgagcgtatttacgcgatgcgtaaaaaagcggtagggctgctgggtaatgcgaaaggcgctgccaaaccgattcctttcgcggaagatacctgcgtgccgcctgaacatctggccgattacatcgccgaatttcgcgctctgctggatggtcatggcttaagttacggcatgttcggccacgtggatgccggggtgctgcatgtgcgtccggcgctggatatgtgcgatccgcagcaggaactgttgatgaaacagatctccgatgaggtcgtcgcgctgaccgccagatacggtgggctgttgtggggcgagcatggaaaaggttttcgtgcggaatacagcccggcctttttcggcgaagttctgtatggcgagctgcgcaaaataaaagcggcttttgatccgcataatcgacttaacccgggtaaaatctgtccgccgcaagggatagaggcgccgatgatgaaggtggatgcggtaaaacgcggcacctgggatcggcaaatcccgctggcagtgcggcagacctggcgcggcgctatggagtgtaatggtaacggcctgtgctttaatttcgatgcgaaaagcccaatgtgcccgtcgatgaaaattagccttaaccggatccactcgccgaaagggcgggcgacgctggtgcgggaatggctccgtctattggccgatcgcggcgtcgatccgttgaagctggaaaaggagttgccagaaaaacgcgccagcttacgcacgctgattgcccgcacccggaatagttggcacaaacgcaaaggcgagtatgacttttcccatgaagttaaagaggccatgtccggctgtctggcgtgtaaagcctgtacgacccagtgtccgattaaaatcgatgttccggagtttcgttcacgtttcttacagctttaccatacgcgttatctgcgcccggtacgcgatcatctggtggcgacggtcgagacctacgcgccgctgatggcgcgtgcgccaaagacctttaacttttttattaaccaaccggtggttcgtaatctggcgaaaaaacatatcggtatggtggatttacctctgctttctgccccttcattgcaacagcaactggtgggccatccgtctgccaatatgacgcttgagcaactggaacgcatgagcgccgagcaaaaagcgaaaacggtactggtggttcaggatccgtttaccagctactacgacgcccgggtcgtggcggactttatccgcctggcggaaaaactgggcaggaggccggtattgttaccgttctcgccgaatggtaaggcgcagcatattaaaggttttcttaatcgctttgcgaaaacggcgaaaaaaacctctgagttccttaatcggatcgccgcgttggggatgccgatggtgggtgtcgatccggcactggtgctgtgttatcgcgacgaatacaaactggcgctgggcgaacagcgcggcgattttcatgtgttgctggtgcatgaatggctggcgcaggaaataaatgcaagactgtccgtcgaggtgagcggcgaaccgtggtacttttttggtcattgtacggaagtcacggctttacccggcgcgcctgcgcagtgggccgccatctttgcccattttggcgcgaagctggaaaatgtcagcgtaggctgctgcggtatggcgggcacttatggacatgaactcaccaatcataaaaattcgctgggaatttatgagctatcctggcatcaggcgatgcaacgtttaccgcgaaaccgttgcctggcaaccggttattcctgccgaagccaggttaaacgcattgaaggtacgggcgtgcgtcacccgttgcaggcattactggagattataggttgatctggaaacgtgaagtgaccctcgatgcgcttaatgcgatgggggaagggaatatggttggcctgcttgatatccgctttgagcgtattggggacgatacgctggaagcgacaatgcccgtcgatcatcgcaccaaacagccgttcggcttgctgcatggcggagcgtctgtggtgctggcggaaagtatcggctcggtcgcaggttatctgtgtacgcagggggagcaaaaggtggtggggctggaggtgaatgccaaccatgtacggtcggcgcgtcaggggcgcgtacgaggcgtctgtaaagcgttgcataccggggctcgccatcaggtctggcagatagagatctttgatgaacagggacgtctgtgctgttcttcgcgtcttactacagcgattgtgtgacgttgtcaccataaaagtgtgatgcatattgcttttggtcaaaatgtgcgcagaaaaaggtgatatactgtgcacgtttacacataagcgaggatgatatgtctactgatttggacccaacccaactggcgattgaatttttacgccgtgataaaaccgaactttctcccgcgcagtatttgaagcgtttaaaacagctggagttagagtttgccgatctcctcaccctctcagcaaccgaactgaaagaagagatctatttcgcctggcggttgggcgtgcattaataaagtctgtgtaggccggataaggcgttagccgccatccggctatgttaccaggcaatctcaccagaccttgtccccaggtaatagataacccccttgattttgtttaaaaaaaatacagatcgccatttgtgctaaaaaggcgcgctctctttatgagattattcttatgccccttcaagagctaagccattaagagtgccggagataagcgccggatggggccggaacccttaagcctgtattgaacagacttaagggtttttcttttccgggcgcgtaaaaaactaaggtctgtcaataaccgccggcatgtcgtcagccgtatgattattcaaaatacggttagccagcacccctgacatcatcgatccgttaacgttcagtgccgtgcgggccatatcaacgataggttcgatggcaataaaaataccgaccagcgcaacgggaaaattcaacgtcgacaggacaatcagcgccgcgaacgtaccaccgccgccgacgccggctacgccaatagaccctagcgcaatggcaggcaacatcgcggccagaaaatgcagcgagagcggatcgatgccgatggtgggcgcaatcatcgctaccataatagccggataaatcccggcgcagccattttgccccatactggagccaaacgaggcggaaatattggcaatggtgctttgtacgccaaatttttcctgggcggaaatggccagcgggatagaggctgcgctgctgcgggaaacaaacgcaaaggttaagacgggccagaccattctgaaataacgcgctggattattaccgctgaggatcagcaagatggcatgcacgataaacatcataaaaatcgcgatgtaacaggcaccgataaaaccaagtaagctggcgaattgttcaaggcggtatgatgaaaatacggtggtcattaatgccatgacgccatagggcgttaatgcaataacgatacgtaccatcttcatgacccatatctgaatagcgttaatgcctgcgcttaatttctgaccttcttccggcgcctcttttttgacctttaacagagcgatccccgctattagcgtgaagataacgatgccgataacggaaacacttctggctcccgtaagatcaagaaaaatattagtcggaatcagcgatgtcactaactggggaatcgacaccgcggcagtcttattgacttcttccgtagttaacattgacggcatgtgcacaaaagcgctggcgtcaagccccagcacatgagcggtcagtaatccgataaaaccggcaaccatcaccaggcataacatgcatccgacgatcgtcagcgacatttttccgatgccggcactattttccagtttattgatggcggaaagaatagaaataaaaattagcggtatagcgaccagttttagcaggtggacgtaaccattgccgacgatgctgtaccattcgataatagttttagtgtgatttgctgaaataaaatgcagggataaaccaataacagcccctaaaaagatagcgataaaaacgcttttcgacagggaatcgcttttttgattaattctcaagatgacccacgagaaaaccaaaaaaagtgcgatatacgcgagcgtaacaaccatattttaagcctcttgcctcattcagcacctgaaatgccggaaagagtttacataaacctatagctcaaactgagttatagaaccgcagcggattataaagagcgcaacgccaggtatccatacaaaaaatggggttctgacctcgccgcccggcaatgtcgacagcctattaattaaatagtcattttctatacatcttttcgtttttgacctgtcagaacggttaatatcttataaatcattacttatcaaaaagttaagttgttttttgtctgtcgtatgacctggcggacagggtctatgcttaataaaaggcgctcaatatgaccatttgttggaaagcccctgcggttaaggggttgaagtgataatcattatcactaacatgctgttatatcctggtgatttagaacgcgaggtaactctatggaattgcattcagacacgtttaacccggaggacttcccctggcaagggctgacgctaacgccagcggcggcagcgcacatacgtgaactggcagaaaagcagccgggcatgttgggcgtgcggttaagcgtaaaacagacgggatgtgccggatttggctatgttctggataccgttcgggagccggataaagacgatctggtttttgaagccgaaggcgcaaagcttttcgcaccgttacaggcgatgccttttattgacggaacagaagtggattacgtacaggaagggctgaaccagttatttaaatttcataaccccaaagcccagaatgaatgcggctgcggcgaaagttttggggtataggcggtactatgtctcgtaacactgaagcaacggaagaggtcggcatctggacaggcggacgccttaattacaaagaaggatttttcacgcaactacccactgatgaactggcaaaaggcatcagcgaagaggtggtgcgcgcgatttccgcaaagcgtaacgaacctgagtggatgctggaatttcgtctcaatgcctatagagcctggctggacatggatgaaccgcactggctgaaagcgcactacgataaattgaactatcaggactacagctattactctgcgccatcatgcggaaactgcgacgatagctgcgtttcccagccgggagccgtacagcaaacgggcgcgaatacctttttgagtaaagaggttgaagacgccttcgagcagcttggcgttccggttcgcgaagggaaagaggtcgccgtcgatgcgatttttgactcggtctccgtagcgaccacataccgtgaaaaactggcggaacagggcattattttctgttcttttggcgaagcgatacacgatcaccctgacctggtcaggaaatatcttggcaccgtcgtgccggggaacgataacttttttgccgcgctgaatgcggcagtcgcttccgatgggacatttatctatgttcccaaaggcgtgcgttgcccgatggagttatccacctattttcgcattaacgccgagaaaaccggtcagtttgagcgcacgattctggtggcggatgaaggcagctatgtgagttatatcgaaggctgctccgcgcccgtacgcgacagttatcagctccacgccgcggtagtggaagtcatcatccataaagatgctgaagtaaaatattccaccgtacaaaactggttcccgggcgacaacaacacgggcggcattctgaactttgtgaccaagcgggcgttgtgcgaaggggaaaacagcaagatgtcgtggacccagtcggaaaccggttcggcgattacctggaaatacccgagctgcattctgcgcggtgataattctatcggcgagttctattccgttgcgctgaccagtggacatcagcaggctgacaccggcaccaaaatgatccatatcggtaaaaacacgcgctcaaccattatctcaaaaggcatttccgccggccacagccagaacagctaccgtgggctggtaaaaattatgccgacggcaaccaacgcccgaaatttcacccaatgcgactccatgttgattggcgcggactgcggcgcgcatacgttcccgtatgttgaatgccgcaataacagcgcgcagctggagcacgaggcgacaacatcacgcatcggtgaagatcagcttttctattgtctgcaacgcggcatcagcgaagaagacgctatttcgatgatcgtcaacggtttctgcaaagacgttttctcggaactgccgctggagtttgccgttgaagcgcaaaaactgctggcgattagccttgagcacagcgtcggttaatgatgaaggaaaaaccatgttaagcattaaagatttacaggtcagtgtggaagaaaaagcgattttgcgtggcctgaatctggagattcgccccggcgaagttcatgccattatggggccgaacggttccgggaaaagcacgctctccgccaccctggcgggacgtgaagattatgaggtcaccggcggctcggttacgttcaaaggtaaagatctgcttgaactgtcgccggaggaacgggcgggtgaagggatttttatggccttccagtacccggtagaaatccccggcgtcagtaaccagtttttcctgcaaaccgcgctgaatgccgtgcgcgcctaccgcgggcaggcgtcgttggatcgctttgattttcaggatctgatggaagaaaagatcgcattgctgaaaatgccggaagatttactgacccgttcggtaaacgtcggtttttccggcggggagaaaaagcgcaatgatattttgcaaatggcggtgctggagccggaactgtgcatccttgatgagtcggactccggactggatatcgatgcgttgaaaattgtggcggaaggcgtcaacgcgttacgcgacgataaacgcgcttttattatcgtgacccactatcagcgcatactggactacatcaagcccgattacgtccacgtcctctatcaggggcgaattgtccgttccggcgattttactctggtcaaacaactggaggagcagggttatggctggcttaccgaacagcagtaaagcgctacagcaatggcaacatctctttgaagaaaaaggagaaagtcgaactgagcaggcaagacaacatttacaacagatgttacgtctgggattgccgacgcgtaaacatgaagactggaaatacacgccgctggagggcttaacccatagccagtttatccagcagtgtgcgactatcagcgccgcacagcgtgatgcgttggcgctgcaaatcgatgccgtgcgactggtgtttgtcgatggtcggtttatgccagagctcagtgatagcacgcaaaacagcggatttgacgttagcgtcagggatgagcgccaggcgcttgccgcgccggtgcagcctgaggtttttctgcatctgacggaaagcctggcgcaatgtgtcacgtatatacaggtacggcgaaatcagcgtccgacgaggccgctactgttaatgcatatcacgcagggtgtggatggcgacgagctgaataccgcgcattatcgccaccatctggcgctggcggaaggcgcggaagcgacggttattgagcattatgtcagccttacagcggcaaaacattttaccggcgcgcgtctgacgatgaacgttgcagacaatgcgcaactgcgccatttcaaactggcgtttgaaaatgcgtccagctatcactttgcgcataacgatcttctgctggcgacagacgcctcggcgtttagccacagttttctgctgggcgccgcagtactacgtcaccacagcagctcacaactgaatggtgaaaacgcgacgcttcgactgaatagtctggcgatgccggtgaaaaatgaagtctgcgatacgcggacatggctggaacataacaaaggctactgtaacagccgccagttgcacaagaccatcgtcagcgacaaaggacgcgcggtctttaatggcctgattaacgtggcgcaacacgccattaaaaccgacggtcagatgaccaataataacctgttgttggggaaactggccgaagtcgataccaaaccgcaattagagatctatgccgatgacgtgaagtgcagccacggcgcgacgatcgggcgtattgacgatgagcagatgttttatctgcaatcacgcggcatcaggcagcaggaggcgcggcacatgattctttacgcgtttgccgcagagttaacggaagctatccatgatagcgcccttaaacagcaggtgctggcgcgaatcggccagcgactgcccggaggcctggtatgacatttcctgtagaaaaagtacgggcggattttcccatactgcagcgtgaagttaacggcctgccgctggcttacctggacagcgcagccagcgctcaaaaacctaatcaggtgattgatgctgaatctgccttctaccgtcacggctatgctgcggtacatcggggtatccatacgttaagcgcgcaggcgaccgaaagcatggagaatgtgcgtaagcaggcgtcgcggtttattaacgcccgctccgcagaagaactggtgttcgtgcgcggtacgacggagggcattaaccttgtcgccaacagttggggaacggaaaatattcgcgccggggataacattatcatcagcgagatggagcatcacgccaacatcgttccctggcagatgctgtgcgagcgcaaaggcgctgaactgcgcgtgatcccattgcatcctgacggtacgctgcggctggagaccttagctgcgctgttcgatgaccggacccgactactggccattacccacgtttccaatgtgctggggacggaaaacccactgccggacatgattgcgctggcgcgccagcatggggcgaaagtgctggtggatggcgcccaggccgtgatgcaccatgctgttgacgtccaggcgctggactgcgatttttacgttttctccggccataaactttacgggccgaccggcatcggcattctgtatgttaaagaggcgttgctgcaagaaatgccgccgtgggaagggggcgggtcgatgatctcgaccgtcagcctgacgcagggaacgacatgggcgaaagcgccctggcgttttgaggcgggaacgccgaatactggcggcatcatcggtctcggcgcggcgattgattatgtgacgtcgctgggactggataagattggcgattatgagcagatgctgatgcgctatgcgctggagcaactggcgcaggtgcctgatatcacgctatatggcccggcgcagcggttgggcgtcatcgcgtttaatctgggtaaacaccacgcttacgacgtcggcagctttcttgataattacggtatcgcggtacgaacagggcatcactgcgcaatgccgctcatggcctggtatggcgtgccggcaatgtgccgggcttcgctggcgatgtataacacccatgaagaagtggaccgactggtggcaggattaacgcgtatccaccgcttattgggataacagtgaggttttatggctgcgctaccggataaagaaaaactgctgcgtaactttacgcgttgcgctaattgggaagagaaatatttatatattattgagttggggcagcgcctggcggagttaaatccgcaggatcgtaatccgcaaaatacgattcatggctgtcagagccaggtgtggatcgtgatgcggcgaaacgccaacggcattatcgaattgcagggcgacagcgacgcggcgatcgttaagggccttatggcggtggtatttattttgtaccaccaaatgacggcgcaggatattgtgcattttgatgtccggccatggttcgaaaaaatggcgcttgcgcagcacctcacaccttctcgttctcaggggctggaagcaatgattcgcgcaattcgcgctaaggccgccactcttagctaaactgtacagacagcgttctacctgatgtcaaatcctttgtcggacggcgacgtcgctttatccagagtggatagagcgtgtattttgttattctgataagcgaagcgctaccagtcgtcgcagagggcatcaccaggaatacaggaggtttggtatgaaacgtgcgtctttcattacgctaactattatcggcgcgtatagcgcgttacaggcagcctgggcggttgattatccattaccgcccgaaggcagccgtcttattggtcagaatcaaacctataccgtacaggaaggtgataaaaacctgcaggctatagcccggcgttttgatacggcggcgatgctcattcttgaagcgaacaatacgattgcgccggtgcctaagcccggtacgctaattaccattccctcgcagatgctattgccggatgcgcccagggaaggcgttatcgtcaatctcgcggagctacggctgtattattacccgccgggagaaaaccgcgtacaggtgtatcccatcggcatcggtttgcagggactggaaactcccgtcatggacacccggatagggcaaaagatccccaacccgacgtggacgccgacggcaggcatacgccaacgttcgcttgagcgggggatcacgctgccgccggtgatccctgccgggccaaataacccgctgggacgctatgcgctgcgtctggcgcacggtaatggggaatatctcattcatggcaccagcgcgccggatagcgtaggtctgcgtgtgagttccggttgcattcgcatgaacgcgccggacatcaaggcgttatttgcgcaggtcagaacggggacgccggtaaaagtgattaaccagccagtgaaattctctgtcgagccgaatggcattcgttatgtagaggtacacaggccgctatcgccggaagaagagcaaaacgtgcagacaatgccctatgtgttgcctgcggaatttaccgcgttcagaaacgcgcaaggggtggatagtcgcttggtcgataaggcgctataccggcgagccgggtatcctgtcagcgtgagcgccgggcagacgccggcggtaaatacgaccgcagtcgaatccgctcagaacggttttgtcggggaagaggggcaaacgcgcgcgacgcagtagcctttgcagcaaacgacggacaaaaaaatggcgcacgatgtgcgccattttatattgtgcgtcaaattatttacagatgcggaatactttgttgtccagacgttggttcgcgcgagcagcatcgtctttagcagcctgaacgtcggaacgcattgcatttacgtcattactcagttgctcaactttagcgctcagcgtctgtacatcggaagacaactgatcgattttagcgttgcttgaacaacctgccagtaacgtggaacccagaactactgcacctaagatcagctggttagtacggttcataacaataacattatactttgtgtggttatgtgggtaaaaaaaatggcgcacgatgtgcgccatttttattacgcaggtactattacttacggtatttagtagcctggttgtccagacgctggttagcgcgagctgcgtcgtctttagcagcctgaacgtcggaacgcattgcgttcacgtcgttgctcagctggtcaactttagcgttcagagtctgaacgtcagaagacagctgatcgattttagcgttgctggagcaaccagccagcagagtagaacccaggattaccgcgcccagtaccagtttagtacgattcattattaataccctctagattgagttaatctccatgtagcgttacaagtattacacaaacttttttatgttgagaatatttttttgatgggaatgcacttatttttgatcgttcgctcaaagaagcatcgaaatgcatgaaagtccctaaaaaaccgaaagaaaacagggggcttccatcggattcttcttagataatccgcaattagatagtaaaatccgatttgatttttttattaatagtggctatcgattaaataaaaaaagcgccggaagggcgcttttttaaacaaattaattcacacaacaattattacagtacgtgaacagaggcggtgttagtggtgccgcttggaaccagcgcgccggagaccatcactacgacgtcgcctttctgggcgaggccgctttgcagggcgacatctttgcccagacggtagaaatcatcagtagaattgatttctttcaccagctgcgataccacgcctttgctcagtactaactgacgggcggtcacttcattggtggtcaatgccaggatggtggcgtccgggaagtatttacgcacggcgcgagcggatttaccgccctgggtcgctaccacgatcagcggcgcttccagtttttcggcggtttctaccgcgccgcggcatactgcttccgtaatgcgcagtttacggctgtcgttgttgtagtccagacggctgttcatgacgcggtcggtacgttcgcagatggtcgccatgatagaaacggcttccagcgggtatttcccttttgcggattcgccggacagcataaccgcatccgtaccgtcgaggatggcgttcgcaacgtcgcctgcttctgcgcgggtcggacgcgggtttttgatcatagaatccagcatctgagtcgcggtgatcacgactttacgtgcgcggatacatttttcgatcatcattttctgcgcaaaaatcacttcttcaaccgggatttctacgcccaggtcgccacgcgcaaccatgatgccgtcggaagcttcgagaatttcatcgaagttgttcaggccttcctggttttcgatcttagagataatctggatattttcgccgccgtgagctttcagatgctcgcgaatttcgacaacgtcagaacgtttacggataaaggacgccgcaacaaagtcaacgccctgttcgcaaccgaagatcaggtcctgtttgtctttttcagccagcgccggcagagcaatagaaacgcccggcaggttaacgcctttgttctcgcccagatcgccgttgttcagcaccttacaaatgactttattgccttcgatggcggtcacttccataccgatcagaccatcgtcaaccaggacggtgttgccaacgctcaggtcgctggtaaagccttcataggtgacggcaacgatttcattattaccgaccacggatttgtcggtggtaaaagtaaaggtttggcccgctttcagcgaaacgtcgttaccgccttccagtttaatggtgcggatttctggtcctttagtatcaagcagaatagcggcttttttaccagttttgctcatcacgttgcgcaaattctggatacgctgaccgtgttctgcataatcgccatgagagaagttcagacgcatcacgttcatgcccgcgtccagcattttgcttaacatctcttcggattcggttttcggaccgatagtacaaacaattttcgtctttttcatgacagtcttagtctttaagttgaggaggatatggaaatctggcttcgggcgcgcacggcccggaagctaagcctgtgttgctaaagtgatgatgcctcgctctaaggataggtgacatcgaaagagcgtgcagaggaatgtgtgctcgcgtttcagcccaacgggaaggggataattttagtcgttgagttttacagtccaatgcgctgaaaccattcaagagacaattggcgcgcattatacgctgaaatttacaaaaaaggaaaatgaaaaccctgtttcaaaagacatctgtgcagatccacaacggtttgttattacgctgtttacgatgtcgctggcgataacgccgcccgaacaggggcggcgttgcgcaacagcgggtgttgttgcgcataatgtcaatcgagcaactttttgccttccaggtcgatggcgatgttttggttgtgtgcttttcgatagcacagaatcgctatcccgatggccgcccagctaattccgagtatcagagcgtgaatgttcatgtttaaacagacgtagccgatgacgatcatccccatgatcggcgaaatgacatgggcgaaaatgcgccgctgggctttcatccggaaattgaacaggataaacacacacaggttcacgacaaaaaaagcgaaaagcgcgccaaagttcaccagcgtggagatagattcaatcttgccggaaaacaggtagctgagcagcagggtgacgccgccggtaaacagaatggcataatccggcgttttacgcgtggtatggacgtgagcgaggaaggcgggcaacattcggtcgcgccccattgaaaataacactctggacaccgccgtttgcgcggtaataatgttgccgacggcgcacacaaacgccacaatgatggaaaacgccactttgagccagataccgccaacgttgccggcaatggtgaaaaatgcttcattcgtcgcattaccttccgcgaagcggtcgacgttaccggtggcgaacgccgcaaacgccacaacgataataaacagtaccgtcgccaaaactaacgccaacagcgttgctttactgacggcgcgtcccccgccttcgctttcttcacttaatgtactgatagcgtcaaagccgagaaagttcagcgcagccaccgaaatcgccgtcgcgatgagccctggggtgaaccactgtgaatcgaaaaaaggccggaaggaaagcgttatctgactactgtccagcagcatcagacggacaatgagtagcacgaaaatcgccagaataccgagttgaataaagaccagtaacttatcgaatttcgccgtttgctgtatcccgagatagttgactccggtgccaatagccacataaatcaacggccagacccagaccgggatttgcggtaaaatagcgtggaccgcgacgccgcccagcactgccacgagcgtagggaacaaaagataatccagcagtaatatccatccggtcagaaaccctacggcgggattaatgcatacgccagcatacgcataggccgaacccgacgaggagatatgctgcgataaggtagagtagctgtacgcggtaaaaaacatcgcgatcgcgccaataatataaaccagcgcaaccataccgtgcgaaagattataaacgacgccataaagagagactggcgcgataggcaccataaacaccagaccataaagcactaaatcggtaagagacaattttttgacttttttcatgataaataccttaatggctttttatgccagatcgcgtaaaaacgcgcttaccgctgcgaggcagggcgcgatattttcttcatgcgggttatggctgctgccgggaatagtgaccgcgcggcagtctgaaatgtgagagagaagcggagagacgacgcgctcggttgcctgatcgttttcgccgcgtagtaccagaacaggacagcgtatctggcacaaatggggcgtaatatcccagtcggcaagtttgccatttgccgccagttcattggttccccataaaatgtgataaaccgtagggtcggcggcgaactgcgcattagagcgctgaacatgaacggcttcttccgcgagggtataaacgtgtctggcataataagcgaccagctgttccggtgggttttgataaatgacggcgggcataatgacgtttttgatatcgtcatcggacattggcgtcagagcgttaaagagccgtatggcttcctgttgccacagggcgatactggccggcgaactggccagtatcgtcccgcgaagcccggcaggctgtaagcaggcgtgctctgcggcaagcattccgccccaggaatgtcccagtatcgaatacccgtgtccaatacccaggtgatgaattaattgggttaattgacggagataacgcgcaatagtccagaaagacgcgtcagcatgaggaaaatgcgttgaacgaccgcagccatattgatcgtaaaatattaccatgcgcccgtcatcagccagacggcgataatttaataaataatcaaagccgccagaagggccgccatgaaggataatgagcggcgtgagtaatgattttctgtctccataaatccgatagcttgtcaatatgttttcagaaaacatttcgccatagagataagtatcattcatattcttaatgactcagtgtgtggcagggcaggcgaaatttatattcgcctggataatattatttttttattgtgtgtaaaacattacaccagaaggtggcgtaatgttcccattgcagaaactgcggacttccccagtgcggcgaacaatcactggcaaaacaacatactttccctttatggtaagtacccataactaacagtggatcgccattaatttcagcaaggacctgactattttctttggcgataagcttgttatagcccaacagcggcggccattcgctaaatggctgggtaataacatgctctaccgcagtatttactgctttacatccttgcggtagttctacgcggtcatctacatccagcatatcaaccggcaatacttccgccagaaccgtatttttataattggcttttgcttctattcccgtaaaggataaatacccgccgatcattaacagaccgccgccctcagcaacataatcggcgataagttgtaatgcatcaggaataatgtccatattataaaacgttctgttttgtagcaggaacgtattgctaccgatatcactgatgacgatcgcatcatagcaggctaatgcttcggcggtttgtggaaaacgagtttgcacaatatgggcaggcatgtagtccacatcgatattaccctggcgtaagcaggataataaatagtctgcaccttcttcatatttgctcgatgtaaagctatcaaaacctttagagtgaatcatatgaatgtgccaggattcgccaataaataaaattttcattatgtcacctgttaattaatgtgaatgactttattagattgggtacgcattcgatgtaaaacctgcaagtgctgaggcatactcgacgcaccgacttgttccaccgccagagaagcgaaagcggaggcatattgaatggctgcgaccatgtctgcttgtcgcgccagcgcggcggctaaggcgccattaaaagcgtcaccggccccagcggcatcttttaccacggcgctccacgcaggaatatacaacgtgcgggcgtgctcacagatcagagagccacgggcgccaagggtaatgatgacttttttcaccccggattgcagaataatatttccggctttttttgcatcattaatatcagtaatggttacaccggataaaaaagaggcttcagtttcattcggcgtgatgatgtcaatatcagataataaatgcgtcacctgtttcgtatagggggcagggttcagcatgatcattttattttcttgtttgcccagacgaataaattcagtcaacgcttcaatgttcgtttcgagctgcattaacataacgtcagactcggcgatataacggtgttgctcattaatctcttgcgtggtgagcatcatattggcgccagggtagatggcgataatattatcgccatccacggcggagacatagatcaatgcgctaccggtgggtgctttatctgtttgatacgcgctgtatgaggtgatgcctgattgaataatatgattcatagcaaatgcgctgaactgatctttgcccactttaaaaataaaatgtgccgcagcgccagcgttgtttgccgctaaagcctggttggctcctttacctccaggatagaatccaaattgactggccagaatggattctccgctttgtggaaaccacggcacggttgctgaaacatcaatattgaatgagcctaaaacacacaccttgcctgctttttttgggttttcccggcgcagttttgcatcctgatggattggcgtggcgatagtgctggagatatcaatcttattttcagtgataagcttactcagcgcgtcacggtttaaaatccctccgccatagcaacgctgaagcatacctgatttctggaaatagcgtagatcggaacgaatagtctcctggctaaccttataaaggtctgaaagtttactgacgctaacactattatcctttatcagtaaattaatgatggcatgacgtctttcttctttaaacatattgcctccgggtagtgagttgaattgtatttatggcaatgttgtcatgcggtgaattcaatcacagattatgcggtcaaccggaagtaaccccaaatgaatgtcaataatcagaagcgcagccaatgtgttaaatattaattgcttacagaaggggaaaatagttttgtgagtgttgtcatatattttctatgtaatatgacggggtgaacgtaaaatagttgggcttgcacgattcagtgagtatatgcagccggacagcgttcgcttatcagtctctaccctcgacgaaataagacgatatcgctctccggcccgggggttatatacgctcgatttttgccggcagcccctgacgtactgccgcgccagaaacccagtcgagccaggtgttggtaatggttcttgtcggatcggcaaagcccagatcgttaagatttatgcctgccctgatttgtggatcatacggcataggcacgccatccagagagtgctgcgttgcgcccatctcgcggtggccatatccgtgttcgatggcgatgacgcctggcatcacgccatttaacaaactgatttgcgccacgacctgaccgcccggcgtaatgatccgtacccgatcgccatgttgcagtccataacgctcgccgtcttgcggattcagcgccaccaggtttgctggcttcacatggtgtaagcgcgggatgacggctgttgagctggacatggtatttgatttaaatgaaatcagtttcagcggccattgcccaatgggaaactggtcgtcaatcgcacgaccatctgacaaacgcgccggataccagaccgggcaaccgctgaagcgctccccggtgatggcgtgacggtgggcggcgacatctgcattccagatctgtaagggttttttccacgcgttacctaaccgttgctccgtatagccgctatcctcgggcgcaaaccggccgccacgcgagtagataaacgccacgcgaccgacctcatcagctttaagcgtgtgctgaattgctggcagaatgcggctgacgccggtaagcgaaatatcttcctgatttgccagcgcgaccggcgtcttgcccataaaggcgatattagcggctacgcgcagatagaagtcttccgcccggttcagtggaaaagtattgccctgcggatcggttatcgcccggtcgccgaagccgggcagatggagccgttttgctaccgcaatacaaaatgcttccattgagacaggttgcccgtccgccgtgcggtgagtggcgggggcgacaaccggccagcgggcggtagtggctttactggctacgccgccccagggcgccgtaaagccccagctctcaaaattgtgcgtatccggcacaatgtaatccgccagcgccgtcgtttcattcataaaggcgtcaatcgcgataaagagcggcagtcggcgagggtcttttagtttttcttccgccacggcgcgtagaccgggaacaccgtaaaacgggttgctcatattggaaatccaggctttaagcggataaggatagccttcgagcgcggaggtcaacagttcggtaagctggcctgccacaaagggataccacggcgctttggctggataaggggattgcccaccggcaattttgtcgcggtattcttccgatgcttcataagcggttttgctacgggcaatacttaacccggacggtttcacttttccggcaaaactgttcatgttgtagcgggggccgtcgctaacgccgttgaatttgccgccgccgacaaagacgccgccggacaagctgaggttgccgatcagcgcgttaagcatcatgaccgaccaggcgttataaaacccattgccggccatcatgccgccgtgactgatgaccgcagctttacgtccgtgactggtaaaggtttccgccagcgcgataatttgcgcttccggcacgccgcactgttcgctgtattgcgccaacgagagcttttctgccgcctctttcaggcgttgcaacccgctcttcaccgtgacccgttggccgtcggcgagcgtaacgtactgcgtcacgaaaagccgtgcctgtcggcaagtggacgcatcgaccaactcgccgtcggtattcagtacgacaggggtctcttcgccatcgggcgtaagatggcgcagcgtcaggtgttgtccggcaagcgtcggcagctcatccgcaatgaccaggtgcgtggcgttggtccaactttgctcgccggcctgctgcatcgcctgtacgccgggaatcgccagataatcagcattataacgttgattatccatgatccagcggatcatccccattgccagcgccgaatcactgccgggcatgaccggttgccagcgaccgcgaggatcggcgagcaccgttgataaggggagggcgggggcgaccacgacgtattgaaaattctcacgcagtcgggcgctcgccaactgacgtgcctggcgtttaaacggattgccggactgtgccggggaggtgcccataaagagcgcaaactccacgttttcccagtcgggtttgacatgcgggtttttatccagatcgcccatcaatgccccggagccggcccggtaagccagtccacagtaggcgccatgcgcgccgaaattcttgctgccgaagctatttagcgcaaaacgacgcagaaacgcatcgcggccttcgtcgctggtattcgtgaccagtaactgattggttttgggcccgaaactggggtgctttgcgtcaattggcgtatccggcgcatgaatagcgcgcagtccgtccacatgaccttcgccaaacagatcgccgccttccacgacttcttcaataagttgctcaaagctgatgcgctgccatttcccttcgccgcgtttacccacgcgtttcatcggttcaagcagtcgtagcggactgtacaggctttccagcagcgtggcgccgcgcgcgcaggcggttgagcgggcgtcaagaccgctttctcccgccagttgctccatggcttcgctaaaagggacggacgagtcaatcgggtgttcctgcgacaaggggtgatagggattgccggcgatgcgtatcactttgccatcggcattaacccgggcgcggataccgcactgtgtccaacagccgaagcattgcgtcatggcgatggtttgttgtggattttgctgccagtgtgtttgcgcctgcgcctccggaattaacgcattgccaaagatgcggtcgcgcgttaccttgccggacgtcccgtttaacaggccatcaattgcgcgtttcgccacatcacggtagctcagaccaaaagtgaccatcccaccgacggcgagaccgacttttagccactgacgacgggttaaattagccatgttgtaatctcctggtgagtccgttcagcgtttcacgaataataatcagtagcgctatccacaggccgaaggtgccgagaatagccagccagccatccgttccgcctggtaacgagtaagggttaaattgcgcgttgaacttggggacggtttgtacctgaatcaacaatgtccagcgcatcagccaacatagcgccagcgcgctgagaaccagcaggacgcgtcttagctgtgataacggatggcgtagcgccaggctacagaacagcagtgtgcatacccacagcgctacccagccgacagcgtaatatttggctgacagggcgacggtaatccactgacggattgccgtgccggaaagcgtatcgccgctaacccacatggccacaaccagccccagcgccgccagcgtccagatttgtccccacaatatttttggcagccttaccgagtcgcgtcgggcggcgacaatcatcagcgcgaagaacgcctgtaaggcgctaagaaacatcgccacggggaaggcgtagctaaaccagattgggcgcgccagcacaacggagacttcgcggccggtataaatcaacaggcccaccgcgcaaagcgcgctggctaacgccaaccatttagtgacgttgtaacttttattgaataatcgtttaatctgctgcgccaggaaccacagagcgagaaatccggtaaacagcggcaggaataacgctccccagggcatccacgaccagggcgtcggccaggcatagaaatgccagacgcgggcggtctggtgcagatccgccgtcagcgccagcggtgcggtaatcgcacaggtaatggcaatcagtaatgcccgattttcttctgttgcggcgtcttttttccgccagtgaagataacaggcaaacagtgcggcgcaggcggcaatgccaataaaaaagaaatattgtaccgcccacggcagccagctaatgtcctgcgggtgagccagcacttcttcaatgatgagtgaatgcgtcattcagacctcctgccaaagcgcgggctgcgcacggcccattaatggggtgacaaaggcgtcgtccagacccaggtagaaaacatggggcgacgtgccgttttccggctttaataccttgatagcgtcgcgatgctgatgaagcatggtggcgatgcggctatggggatctttgatatcgccaataatacgcgcgccgccgacgcaggactctacgcaagcgggtaacagtccggcttccagacgatggacgcaaaacgtgcatttatcggcagtttgcgtttcatgattgataaatcgggcgtcgtaaggacacgcctggacacaataggcgcagccgacgcagcgtttgttatccaccaccacaatgccatcttcccgctgaaaggtggcttgtaccgggcagaccggcacacagggggggttatcgcaatggttgcacagacgcggcaacagcacattcgtgacttcctgactaccttcacgctggacctggtattggttcaccgtcgtacgaaacgcgccttgcggcgtttggttttcaatagtgcaacttacggtacaggactgacagccgatacaacgccgcagatcgataagcatggcgtaacggtgtcggggagagccttcatgccgctccggcgaaaaaggaaatttcgcttcagccagcggaaccagcgaggcgccagcggtcaggacgccaagctgctggagaaattgccgtttactgctgtccatattgactcccgtccacattgccaacaatgaaacatttgtcacgatgttggttcatgtgtaatgaataaaaaatgtcgatgatttacagtgtaaaaatcgaggcggggtgcgctctattgtggttaaccacatacccggcttgttgttgatctaaaacaacataattgacagggatattggggtgagaggtaaaaccgtaaggcgcctggcggtgttggcggcagtagggctactttgtcatggcgcgtgggcagggacgtggaatatcggtattttggccatgcgcggcgaggcgtctacgcgtagccactggcaaccgttggcaaagacattaagccaacagcttccaggcgaaacctttcacatccagccgctggatctgcatcaaatgcaggaggccgttaaccagggaaccgtgcagtttgtgataaccaacccggcgcaatttgtccaactgaacagccatgcgccgctgcgctggttagcttccctgcgctccacgcgcgatgggaaagcggtgagtaatgttattggcagcgtgattttgacccggcgcgatagcggcatcaccacggcgcatgatctcatcggtaagaccgtcggcgcgattgatgctcaggcgtttggcggctatttattaggctataaagcgctcagcgacgcgggcttacgcccggagcgcgattttcatctccgttttaccggatttcctggcgatgccttagtctatatgctgcgcgaaaaagcggtgcaggcggcaattgtgccagtgtgcctgttagaaaatatggatcaggaaggattgattaataaaaaggactttatcgcgctgctttcccgaccgacgcccctgccttgcttaaccagtacgccgttatatcctgactggtcgttcgcggcgctacctgcggtaagcgatgcgctggcggatcgcgtaacgcgagcgctattcaacgcgcccgccgccgcgtcatttcactggggcgcgcctgcgtccaccagtcaggtggaagccttgctgcgtgatgttcgtcagcaccctcagcagcgtcgactgtggctggatgtcaaaagttggttaatccagcaccagctaatggtcggcggcgtgattctggcgttcttgttgctcacgctcaattatatttgggtcatgctgctggtgcgtcgacgtggaaagcaactggaacgtaatagcgtagttcttcatcagcatgagcgggcgctggaaaccgcccggcaaatgagcgtgttgggtgaaatgacctccgggtttgcccatgagcttaatcagccgctttccgcgattcgacattatgcccaggggtgcctgattcgactgcgcgctgcagatgaacagcatcccttgctgccggcgctggagcagattgaccagcaggcgcaacgcggtgcggatactctgcgtaacctgcgtcactgggtcagccaggcgcagggcaacccggtgctaaccgaagcgtggaaggccatagccattcgcgaggcgattgatcatgtctggcaattgttgcgtatggcgcaacagtttccgacagtgactctgcataccgaggttagcgctgcgctgcgcgtaacgctgccgtcagtgctgctggaacaggtgctggcgaatatcattcttaatgcggctcaggcgggcgccacccatttatggatcgttgctgaacgcactgaaaacggcatcagtattgttttacaggataacgccgggggaatcgatgaggcgctattacgtcaggcgtttcagccgtttatgaccacccgtaaagaggggatgggcttagggctggcgatttgccagcggctggtgcggtatgggcggggcgatatcagcatcaggaaccagaccgcgccggacggtctgtcgggaacggtggttacgatacatttcttacatgaaaatgggggcagggatggcgacaattcatctactggatgatgatacggcggtcactaacgcgtgcgcgtttttactggaaagtctgggatatgacgtaaaatgctggacgcagggggcggattttttggcgcaggccagtctgtatcaggccggggtcgtattactggatatgcgaatgccggtactggatgggcagggcgttcatgatgcgttgcgccagtgcggaagtaccctggcggttgtttttcttaccgggcatggcgatgtaccgatggccgtggagcagatgaaacgcggcgccgtcgattttctgcaaaaaccggtatcggtaaaaccgctacaggcggcgctggagcgtgcgctgacggtttcatcggcagcggtggcgcgtcgtgagattatactgtgttaccagcagttgacgccgaaagagcgtgagctggccagcctggtggcaaaaggatttatgaaccgtgaaattgcggaagcgatgaatatcgcggtgcgtaccgtagaggtgcaccgcgccagagtcatggaaaaaatgcaggccggtagcctggcggaactgattaggcgtttcgaaaaaatggcctcgccagagaccagaatacgaacaacgtatgagccatgaataataaaccgcgttatttctttgatttgcatcaaattttgtttaatagagaagactgttatattctgttggtttgatctggcgacgagtaaaacgtatgacaaaaccgacaaaagatgacgaactgtaccgcgagatgtgccgggtggtgggcaaggtcgtgctggaaatgcgcgatctggggcaggagcctaaatatattgttattgcgggcgtgttaagaaccgcgctggcgaatcaacgcatccaacgtagcgcgttagaaaaacaggctatggaaaccgtgattaacgctctggcgcggtcatagccgctatcagggtggcaataacgacatcgcctttgaattgtcgcgattgtcaccatggcgggcgggttacccgccgttagcgatgcgcagggttatcaggtgatggctaagcgcagccctaatgtatcagggtacggctcaaaataattctggctgcgtagatagtcatccggatgttccgccagatagtgcttcagcagcgttaacggtgccaggataggtagtcggcccgcccggtagccgagaatcacctcgcgtaattccgcgcgttgcctgctgttcaacgcgcggtgaaaatagccctggatatgcatcagcacattggtgtgatttttacgtgaagcggggtggcgcaggatagccatcagtttttctctgtatcggacaaagaaggcatccagatcgtcccactcatgcagacgcgcgacgaaagggccaatttcgcggtagccggcctggtggtgggcgagaagctgaagtttgtatcggctatgaaacgcgagcaaactgtgacgactcaagccctgcgcgcgtagcgcatttaattcatgtagcgcgaagatacgtgcgatgaaattctcgcgtagtaccggatcgtgcaggcgaccatcttcctctatcggcagccagggatatttgtccatcatcgcggcggtaaacagccccgtgccagctttgcggcccctgttacccttttcatcatacaggcgaacgcgctccattccgcaactgggcgattttgcacacacaataaaccccgccagttcgcctattgttggcagaaaccgatcagcaaaggcattcattcgctcggtgacgtcatcgtgcggggcatggctatagcgcatccgaatgtcgccacaggtcgtctggataagacgcagcgcagggcggggcacgggcaggccgatcgccacctccgggcagatcggtttgtaggccacccacggcgccagagagttcatgacaaaatccatacgcttatgtccgccatcaaagcgtaccgtggcgccagtcagacatccgctaatgccgactacgggtttgttattcatgattcccccttattgaaagtacgacgactgacgccaatggcgcaaaatgttatctcacgctgatttaaaacttacacaactttgtttttttgtctaagttttcgcggagattttttttgacgtaattaaatatcaataagatagaatgaggggaagaaatctatttcagcgcctatagtgtgataacctccagcgaagcgaccacgttgcgccactgggcaagctgttttttctgcccggcagtgagctttccggtggtcaccaggaaccattttctctgggcgaacagctcgggcgccagcacaactgggggcgagggaagcacattgagccgcagctcttgtccggtacgagtcaacgtttccagccagatttcacagtgatccgagagattccatccgctaataaaggcattgttgccaggcgcttttctgtcgccttcaaggcaaaaagaggtgtaggcaataatgatgccatccagtatttcgcgcagcgtcatcacggcgggaagatgcgcggacactttgctgcgcaacggacgcaataaatgggtcaccagttctgcgcggggatattcccggccacagtcataaatcaactgccgcagcgcgtcaattcgcccttcgtggagatgttgaagcatcgtctcctggatcgttatccagttatcgcccaggcgaataaccggacgcgacagtaagggtttgacctggcttatcggtacgccttttctcacccagtcgagaatgctaagcgcttgtcgaatatcgtcatcgctgtataagcgatgtccgccatcagtacgctgcggtttcaataaaccatagcgtcgctgccatgcccttagcgtggcggcattgataccgcatagtctggcaaattcgccgatagaatacgacatggtaaagcccgttaaataaggggattctactatatcatgatcaaatgaagactaaggtagtgataaatggtgcggcataccagggcatccgtatggattttgtcgatgatgagcaatactgcgtggcgtaaggctcatcaaaatatgaccaatgcttaataccatcggacgcccctggttaatactctattaacctcattcttcgggcacagttaagtaactctgtcactttatgaacctgtagctttctcatcatattcatccggtgtgtttcgacggtttttatactgatatgtagcttttcgctgatcccatgattggtatacccctcgtcaataagtttaagaacctgacgctcgcgcaaagtaagcagttgatgattggtcgtgtcagcgtttaattcagccaggatagcttcccgattcaacgttgggtcaatgtaacgcttgtttactgctactgtttgcaatgccgctaacagaacttgctgactactgctttttaaaacatagccattagcacctgcggctaaagttttaatggtcatatactcttgttggtatgctgtgtaaaccagaatattcattgctggccaacgctgatgtaattgaggaatgatatccaggccattgatgccaggtagactaagatcaaggataagtatgtcaggctcgtatgcacaacaggcattataaacctcaagaccatttttaacatgctctacaattttaaaatgaggccagggtaataaggcattcataatgccgttaatgatgatttcatgatcgtctactaataagatcttatattctttcattttgctgccctcgcgaaaattaagataatattaagtaatggtgtagtttttgaagatcatacgtattttctggcgtaagtcggttagttcctccagcgcgatgattttccccatttttacgcgattctcaatgtctatgacatagcataccaattcagtctgccctatttgacctaaacagccttttaatgtgtgaattaactgatcgattttttctccagccgatacggcattttcaatatcagccagcaagaggtccagtgattggaaaatcttgctattaatgaccatatcatctgtcgccagtagcgctgagcagcgactcggatcctgctcctgtagctctatatttcgtaaaagttggtattctgcggcaatactgatgtagcgagctaaggtagccaatgtcactggttttgtaatgtaatgatgaatcccattttttttacaacgatgaatatcttctgtcgctacgctagcggatagtgccacaaacatgcagtcaggatctaaattattcggctcatcatgccataatcgtacacattcaataccatctatttctggcattctaatgtcaatcagtactaaatcgaatcgctgctgttgtgataaagtcagagcctcgttactactggcggcaatagtgacgtgttggcccaggctgacaagcattttgccgatgatatcccgattaatatcggcatcatcaaccaaaagaatctgcaactgccagggtggtaacaaattatttattactggcatatttggtgtacacaatattaactgttgcgccaggtcgtagagttttccggagaaatacaaaagctctgcgttgagaagcgcattttgctggtggggtggttcaccgcgtattccccagcaagccagttgccgatgcaggcagaacggcgctgacagcgtccctttaattggttgaggcggctggtattcttgtaagggtaatactagcgagacacaggttccaaccccggggacactttttagtgtcagattaccgcccatcattttagccaggcttgacgcaatagtcagtccaattcctgtaccttgcgaatttgtgtctgcttgataaaaagcagtaaagatttgagactgctgctgtatttcaatccctttaccgctatcgctaaccagaaatattaattgttcctcatgacgcttgaccgtcagacgtatccctccggtttcggtaaattttaccgcgttcccgagtaaattaaccaaaatttgccgtaaacggatactgtcggtatgaaaatagagagggacatgttgaccgacaaaagtacgtaatgacagttttttgctttgcgctggcccctggatggtttgcattgcctggtccagtaacggcagtaacgctgtttcttccatatgtaatgtgaaatgaccagactcgatgcgtgaaaaatccagcagattattaataatagctaacaaagacagtgtacaatttctggcggtatcagctaatccttgttgctctatgtttaaaggggtggtttgtaataattcaattgcaccgagtacgccattcatcggagtacgtaactcatgacttattaccgtaagatgaatgcttttacgtttgttagctcgctcagcgcgtttttttgcttcatttagcgcctgggtgcgctctgcgactttgttttccagattgtcgtattggacttgtagagtatcaagcagttggttaaaagcaccggcaatactatctaattcatccagtcgttgtgctggtaaacgtgtgctcagcggtgcagttgcggttttattaatgacatcgacaaaacgccataacggtttggccagtgagcgatgtagtaaccagcaaaaagccgacgtcatcaacaccaatgctgttaatgtaaaggggatttgttgaaggataatttttaagatgcgattatgtagattaccgtatgggtacagcgtaaccagactccatccggggccatgcaaggttgtgcgtaatatcagaaatccgggaatttgctgccatccatcatgcagcgttacattttctaactgtgtacgtattttttgcgggatgtatgaaaacggcaataagtggttgttttgatccagccatactcgaatactatcatctaatggcaggtggctcttagtaatgagatcgggaagtttaaccgtcacctcaaaaaatacgccttgctgatcggcaaccgcaacggaagcgtgccatcctttgccgtttatgtattctggttcactccagtaaaacccggcatgggttgggtataaaggaaagctttttcgcgttaaaggctgtagagttgaataatctgaagggttatcagtagataataacgaaatctcatttttatgattaagaataaaactatcgcgacgaaagctattttcatcgatatcagaggactgcagaaagagacggtgcttctctccgtttagcgtcggcgtgcaatttgaaggaccgacagatagatgccggctcacctcagggaaaatatcgttatgatgaatctcagtcgctaatgagcattgatacattaaatttttagcgtcacgttcagcttcttcaaaccgttgattgcttagtacaatattcatctcggatagaacggataaatcctctattatatgctgccgtttctgaaccattgatatataagctgcggtaagcacagatagcagccaaataattattgttgttaataaaaataaaaaagttagcctgattactaaagatgtttgcagcgtattcttgagattgagcaaattcataatgcttccctccagttgcctgttgcaaaatctttggcacttgatcactatcgcagtacatatagtttcatcagaagattaatcgatggtgttatcattaggaagataaatttcttcatatataacccagtcgatgactacaattactttttaataagatggcgatgtaaaaacatcgtaacagtttatttaataaataatttttcaaattgtaagtttttatgtcaatgctgaaaatgtaattgtgaatttatcggaaaatccgaatgatagaatcgcctgtgacaaggtatatgtagacagcatcctgatattgtacaagaagagtatagtcgaaataaatgtgaatcaggctttttacggatgtggttgtgagcgaatttgatagaaactcccatttatgtctgaggagggattcatgctggcagttttaaaaggcattccattaattcaggatatcagggccgaaggtaatagccgatcctggataatgactattgatgggcatcctgccagaggagaaattttctcagaagcattttctatttctttgttcttaaatgacctggaaagcttacctaagccttgtcttgcctatgtgacactactgcttgcagcacacccggacgtccatgattatgctatacagctcacagcggatgggggatggttaaacggttattataccacaagtagtagctctgagcttattgctattgagatagaaaaacacctggctttaacttgcattttaaaaaatgtaatacgcaatcaccataaactttattcgggtggggtataaaatggtagtaaataaacgtttaatcttaattttactatttatactcaatacagcaaagagtgatgagttatcatggaaaggtaatgacttcaccctttatgccagacaaatgccattagcagaggttttacatctgctctcagagaactatgatacggctattactattagcccattgataacagctacatttagtggaaaaattccgcctggaccaccggtcgatattttgaataacctggcagcacaatatgatttgcttacctggtttgatggcagcatgttatatgtatatcctgcatcgttattaaaacatcaggttatcactttcaatattttatctactggacggttcattcattacttacgcagccagaatatcctttcatcaccgggatgcgaggttaaagaaattaccggtaccaaagctgtggaggtgagcggtgttcccagctgcctgactcgtattagtcaattagcttcagtgctggataatgcgttaatcaaacgaaaagacagtgcggtgagtgtaagtatatacacgcttaagtatgccactgcgatggatacccagtaccaatatcgcgatcagtccgtcgtggttccaggggtcgttagtgtattgcgtgagatgagtaaaaccagcgtcccgacgtcatcgacgaacaatggttcacccgctacacaggcattgcccatgtttgctgccgacccacgccagaatgcagtgatcgttcgtgattatgcggccaatatggccgggtatcggaaactcatcacagaattagatcaacgccagcagatgatagagatttcggtgaaaattatcgatgttaatgctggagatattaaccagttaggcatcgactggggaacggcagtgtcgctgggtggcaagaaaattgcgttcaatacaggtttgaatgacggtggtgctagtggtttttcaacggtaatcagcgatacctcaaactttatggtgcgtctgaatgccctggaaaaaagctctcaggcttatgtactttcccagccatctgtggtgactttaaataatatccaggctgtgctggataaaaatattactttctataccaaactgcagggagaaaaagtggctaaacttgaatccatcactacgggttctttgttacgcgttacacctcgcttgttaaatgacaatggcacgcaaaaaataatgcttaatcttaatattcaggatggacaacaaagtgatacgcaaagcgaaacagacccgctgcccgaagtgcaaaattctgaaattgcttcgcaagccacattattggccgggcaaagtctattgctgggagggtttaaacaaggtaaacaaatccactcgcaaaacaaaatccctttattgggcgatattcctgttgtaggtcatttgtttcgcaatgatacgactcaagtacatagtgtaatcaggctttttttgattaaagcctcagtagtaaataatggcatatctcatggttaatccaaagagttcctggaaaatacgttttttaggtcacgttttacaaggccgggaagtatggctgaatgaaggtaacctgtcactgggggagaagggatgcgatatttgtattccgctggctataaatgaaaaaattattctgagagaacaggcagatagtttatttgttgatgccgggaaagccagagttagagttaatggccgcagatttaatccaaataagccgctaccatccagtggggttttgcaggttgcgggagtggctatcgcgtttggtaaacaggattgtgaacttgctgattatcaaatacccgtttccagatcagggtactggtggttggctggcgtattcttgattttcatcggtggaatgggtgtcctgttaagtattagtggtcagcctgaaacggtaaatgacttacctttgcgggttaagtttttattagacaaaagcaatattcattatgtgcgggcgcaatggaaagaagatggcagcctgcagttgtccggttattgctcgtcaagcgaacagatgcaaaaggtgagagcgactctcgaatcatggggggtcatgtatcgggatggtgtaatctgtgatgacttattggtacgagaagtgcaggatgttttgataaaaatgggttacccgcatgctgaagtatccagcgaagggccggggagcgtgttaattcatgatgatatacaaatggatcagcaatggcgcaaggttcaaccattacttgcagatattcccgggttattgcactggcagattagtcactctcatcagtctcagggggatgatattatttctgcgataatagagaacggtttagtggggcttgtcaatgttacgccaatgcggcgctcttttgttatcagtggtgtactggatgaatctcatcaacgcattttgcaagaaacgttagcagcattaaagaaaaaggatcccgctctttctttaatttatcaggatattgcgccttcccatgatgaaagcaagtatctgcctgcgccagtggctggctttgtacagagtcgccatggtaattacttattactgacgaataaagagcgtttacgtgtaggggcattgttacccaatgggggagaaattgtccatctgagtgccgatgtggtaacgattaaacattatgatactttgattaactatccattagattttaagtgagtggaaaatgacaactttgacccggttagaagatttgctgcttcattcgcgtgaagaggccaaaggcataattttacaattaagggctgcccggaaacagttagaagagaacaacggcaagttacaggatccgcagcaatatcagcaaaacaccttattgcttgaagcgatcgagcaggccgaaaatatcatcaacattatttattatcgttaccataacagcgcacttgtagtgagtgagcaagagtaaagtaaaaatatcttagagcctatcccaccaggcgttaattggcgcagccagtttggacacggatagcgcgcaaaaaccgcagcgtacacgtagtacgtgaggtttgactcgctacgctcgcccttcgggccgccgctagcggcgttcaaaacgctaacgcgttttggcgagcactgcccaggttcaaaatggcaagtaaaatagccctaatgggataggctcttagttagcacgttaattatctatcgtgtatatggaggggaatgatgataaagaaaaaggctgcgtttagtgaatatcgtgatttagagcaaagttacatgcagctaaatcactgtcttaaaaaatttcaccaaatccgggctaaggtgagtcaacagcttgctgaaagggcagagagccccaaaaatagcagagagacagagagtattcttcataacctatttccacaaggcgttgccggggttaaccaggaggccgagaaggatttaaagaaaatagtaagtttgtttaaacaacttgaagtacgactgaaacaacttaatgctcaagccccggtggagataccgtcaggaaaaacaaaaaggtaaagcataatgtcttcaggaaacatcttatggggaagtcaaaaccctattgtgtttaaaaatagcttcggcgtcagcaacgctgataccgggagccaggatgacttatcccagcaaaatccgtttgccgaagggtatggtgttttgcttattctccttatggttattcaggctatcgcaaataataaatttattgaagtccagaagaacgctgaacgtgccagaaatacccaggaaaagtcaaatgagatggatgaggtgattgctaaagcagccaaaggggatgctaaaaccaaagaggaggtgcctgaggatgtaattaaatacatgcgtgataatggtattctcatcgatggtatgaccattgatgattatatggctaaatatggcgatcatgggaagctggataaaggtggcctacaggcgatcaaagcggctttggataatgacgccaaccggaataccgatcttatgagtcaggggcagataacaattcaaaaaatgtctcaggagcttaacgctgtccttacccaactgacagggcttatcagtaagtggggggaaatttccagtatgatagcgcagaaaacgtactcatgaaaaaagacccgaccctacaacaggcacatgacacgatgcggtttttccggcgtggcggctcgctgcgtatgttgttggatgacgatgttacacagccgcttaatactctgtatcgctatgccacgcagcttatggaggtaaaagaattcgccggcgcagcgcgactttttcaattgctgacgatatatgatgcctggtcatttgactactggtttcggttaggggaatgctgccaggctcaaaaacattggggggaagcgatatacgcttatggacgcgcggcacaaattaagattgatgcgccgcaggcgccatgggccgcagcggaatgctatctcgcgtgtgataacgtctgttatgcaatcaaagcgttaaaggccgtggtgcgtatttgcggcgaggtcagtgaacatcaaattctccgacagcgtgcagaaaagatgttacagcaactttctgacaggagctaaaaatgaatcgaattcacagtaatagcgacagcgccgcaggagtaaccgccttaacacatcatcacttaagcaatgtcagttgcgtttcctcgggttcgctgggaaagcgccagcatcgtgtgaattctacttttggcgatggcaacgccgcgtgtctgctatccgggaaaattagtcttcaggaggcaagcaatgcgttgaagcaactgcttgatgccgtacccggaaatcataagcgtccatcattgcctgactttttgcagaccaatcccgcggttttatcaatgatgatgacgtcattaatactcaacgtctttggtaataacgctcaatcgttatgccaacagcttgagcgggcaactgaggtgcaaaatgcattacgtaataagcaggtaaaggagtatcaggagcagatccagaaagcgatagagcaggaggataaagcgcgtaaagcgggtatttttggcgctatttttgactggattaccggcatatttgaaaccgtgattggcgccttaaaagttgtggaaggttttctgtccggaaatcccgcagaaatggctagcggcgtagcttatatggccgcaggttgtgcaggaatggttaaagccggagccgaaacggcaatgatgtgcggtgctgaccacgatacctgtcaggcaattattgacgtgacaagtaagattcaatttggttgtgaagccgtcgcgctggcactggatgttttccagattggccgtgcttttatggcgacgagaggtttatctggcgcagctgcaaaagtgcttgactccggttttggcgaggaagtggttgagcgtatggtaggtgcaggggaagcagaaatagaggagttggctgaaaagtttggcgaagaagtgagcgaaagtttttccaaacaatttgagccgcttgaacgtgaaatggctatggcgaatgagatggcagaggaggctgccgagttttctcgtaacgtagaaaataatatgacgcgaagcgcgggaaaaagctttacgaaagagggggtgaaagccatggcaaaagaagcggcaaaagaagccctggaaaaatgtgtgcaagaaggtggaaagttcctgttaaaaaaattccgtaataaagttctcttcaatatgttcaaaaaaatcctgtatgccttactgagggattgttcatttaaaggcttacaggctatcagatgtgcaaccgagggcgccagtcagatgaatactggcatggttaacacagaaaaagcgaagatcgaaaagaaaatagagcaattaataactcagcaacggtttctggatttcataatgcaacaaacagaaaaccagaaaaagatagaacaaaaacgcttagaggagctttataaggggagcggtgccgcgcttagagatgtattagataccattgatcactatagtagcgttcaggcgagaatagctggctatcgcgcttaatctgaggataaaaatatggaagcgagtaacgtagcactggtattaccagcgccttccttgttaacaccttcttccactccatctccctccggggagggaatgggtactgaatcaatgcttctgttatttgatgatatctggatgaagctaatggagcttgccaaaaagctgcgcgatatcatgcgcagctataacgtagaaaaacaacggctggcctgggaactgcaagtcaatgttttacagacgcaaatgaaaacaattgatgaagcgtttagagcatcaatgattactgcgggtggcgcaatgttgtcgggtgtactgacgataggattaggggccgtaggcggggaaaccggtcttatagcgggtcaagccgtaggccacacagctgggggcgtcatgggcctgggggctggtgtagcgcaacgtcaaagtgatcaagataaagcgattgccgacctgcaacaaaatggggcccaatcttataataaatccctgacggaaattatggagaaagcaactgaaattatgcagcaaatcatcggcgtggggtcgtcactggtcacggttcttgctgaaatactccgggcattaacgaggtaaacatggtgcaagaaatagagcaatggttacgtcggcatcaggtgtttactgagcctgcatatttaggggagaccgccatattacttgggcagcagtttatattatcgccttacctggtgatctatcgtattgaggcaaaagaaatgattatttgtgagttcaggcgcctgacgcccgggcaacctcgaccacagcaattgtttcacttactgggacttttacgcgggatatttgtgcatcacccgcagttaacatgtttaaagatgttgataatcaccgacgttctggatgaaaaaaaagccatgctacgcaggaaattattgcgcatcctgacagtaatgggagcgacctttacacagcttgatggcgataactggacagttttatccgccgagcatcttatccagcgacgtttttaaatgaccttcctgacgtaaatcattatcacgtgaaaataacaatcaataggtatgatgatgaaagaagatcagaaaaataaaatacccgaagacattctgaaacagctattatccgttgatccggaaaccgtttatgccagtggttacgcctcatggcaggagggggattattcgcgcgccgtaatcgattttagttggctggtgatggcccagccatggagttggcgtgcccatattgcattggctggcacctggatgatgcttaaagaatacacgacggccattaatttctatggacatgccttgatgctggatgccagccatccagaaccggtttaccaaacgggcgtctgtctcaaaatgatgggggaacccgggttggcgagagaggcttttcaaaccgcaatcaagatgagttatgcggatgcctcatggagtgagattcgccagaatgcgcaaataatggttgatactcttattgcttaaataacagaacgaaatatgaaaattcatattccgtcagcggcaagtaatatagtcgatggtaatagtcctccttccgatatacaagcgaaggaggtatcgtttcctccccctgaaattccagcgcctggcacccccgcagcccctgtgctgcttacgcctgaacaaataaggcagcagagggattatgcgatacattttatgcaatacactattcgtgcgctgggtgcgacagtcgtgtttgggttatcggttgctgcagcggtaatttctggcggggcaggattacccattgctattcttgcgggggcggcgctcgtgattgctattggggatgcttgctgtgcgtatcataattatcaatcgatatgtcagcaaaaggagccattacaaaccgccagtgatagcgttgctcttgtggtcagtgcgctggccttaaaatgtggggcaagtcttaactgcgctaacacccttgctaattgtctttctttattaatacgttcaggaatcgctatttctatgttggttttacccctacagtttccactgcccgcggctgaaaatattgcggcctctttggacatggggagtgtaattacctccgttagcctgacggcgataggtgcggtactggattattgccttgcccgcccctctggcgacgatcaggaaaattctgttgatgaacttcatgccgatcccagtgtgttattggcggaacaaatggcagcgctctgtcaatctgctactacacctgcattaatggacagttctgatcatacatctcggggagaaccatgaaacctgttagcccaaatgctcaggtaggagggcaacgtcctgttaacgcgcctgaggaatcacctccatgtccttcattgccacatccggaaaccaatatggagagtggtagaataggacctcaacaaggaaaagagcgggtattggccggacttgcgaaacgagtgatagagtgttttccaaaagaaatttttagttggcaaacggttattttgggcggacagattttatgctgttccgctggaatagcattaacagtgctaagtggtggaggcgcgccgctcgtagccctggcagggattggccttgctattgccatcgcggatgtcgcctgtcttatctaccatcataaacatcatttgcctatggctcacgacagtataggcaatgccgttttttatattgctaattgtttcgccaatcaacgcaaaagtatggcgattgctaaagccgtctccctgggcggtagattagccttaaccgcgacggtaatgactcattcatactggagtggtagtttgggactacagcctcatttattagagcgtcttaatgatattacctatggactaatgagttttactcgcttcggtatggatgggatggcaatgaccggtatgcaggtcagcagcccattatatcgtttgctggctcaggtaacgccagaacaacgtgcgccggagtaatcgttttcaggtatataccggatgttcattgctttctaaattttgctatgttgccagtatccttacgatgtatttattttaaggaaaagcattatggatattgcacaattagtggatatgctctcccacatggcgcaccaggcaggccaggccattaatgacaaaatgaatggtaatgatttgctcaacccagaatcgatgattaaagcgcaatttgccttacagcagtattctacatttattaattacgaaagttcactgatcaaaatgatcaaggatatgcttagtggaatcattgctaaaatctgaagttattagcgacgatgttcgacggttgctgctggaaatcatgtttgcgggcgttaaccatagcctgatttcccaggtacatgcgatgttaccagcgctaacggttattgttccggataaaaaattacagttggtatgtctggcattattgttggcgggtttaaatgagccgctaaaagccgcgaaaattttatcggatatagatttgccagaggctatggcgctgcgtctgttatttcctgcaccaaatgaggggtttgaaaattgaatatttctgatatgagcgtagtgcctgtaagcactcaatcttatgtaaagtcctctgcagaaccgagccaggagcaaattaatttttttgaacaattgctgaaagatgaagcatccaccagtaacgccagtgctttattaccgcaggttatgttgaccagacaaatggattatatgcagttaacggtaggcgtcgattatcttgccagaatatcaggcgcagcatcgcaagcgcttaataagctggataacatggcatgaaggttcatcgtatagtatttcttactgtccttacgttctttcttacggcatgtgatgtggatctttatcgctcattgccagaagatgaagcgaatcaaatgctggcattacttatgcagcatcatattgatgcggaaaaaaaacaggaagaggatggtgtaaccttacgtgtcgagcagtcgcagtttattaatgcggttgagctacttagacttaacggttatccgcataggcagtttacaacggcggataagatgtttccggctaatcagttagtggtatcaccccaggaagaacagcagaagattaattttttaaaagaacaaagaattgaaggaatgctgagtcagatggagggcgtgattaatgcaaaagtgaccattgcgctaccgacttatgatgagggaagtaacgcttctccgagctcagttgccgtatttataaaatattcacctcaggtcaatatggaggcctttcgggtaaaaattaaagatttaatagagatgtcaatccctgggttgcaatacagtaagattagtatcttgatgcagcctgctgaattcagaatggtagctgacgtacccgcgagacaaacattctggattatggacgttatcaacgccaataaagggaaggtggtgaagtggttgatgaaatacccttatccgttgatgttatcgttgacaggactgttattaggagtgggcatcctgatcggctatttttgcctgagacgccgtttttgagccgacctgatcccgaggtgttgcaactttatcgttatttctggcaacctgctcgttacgctgtaccggaatggctggataagctgggctttcatctttcaaactgctggcgttatggcgatcggcccgagttggatcgtcttcttgacagagcgttaaatagactaagaggaagctctgttattccagcctgtttaaatgacaggcaaaaacggcaggttcgtcttgcgccgcgtatatcggcatttgcctttgggctgggattattcaaactcaggtgtagtgactattttatgctaccagagtatcggcaattgcttctacagtggtttagcgaggatgagatctggcagctatatggttggttggggcaaagagatggcaaattacttcctccgcaagtgatgcaacaaactgcattgcagatcggtaccgccattcttaatcgggaagcgcatgacgatgcggttttacatgcgctattagtattattaccccctccgcagcgtatactttggccgaagacttctcttaccgagattatcttcatggagcatttgctatgagttttacttcacttcctctgacggaaattaaccataagctacccgctcgaaatattattgagtcacagtggataacattacaattaactttatttgcgcaagagcaacaagctaagagagtttcacatgctattgtgagctccgcttaccgtaaggctgaaaaaatcatccgagacgcctatcgttatcagcgtgaacagaaagttgagcagcaacaagaactagcgtgcttgcgtaaaaatacgctggaaaaaatggaagtggaatggctggaacagcatgtaaaacatttacaagacgatgaaaatcaatttcgttcattggtcgatcacgcagcgcatcatattaaaaatagtatagaacaggttctgttggcctggttcgaccaacagtcggtagacagtgttatgtgccatcgtctggcacgccaggccacggctatggcggaagagggagcgctttatttgcgtattcatcctgaaaaagaggcattgatgcgagaaacttttggcaagcggtttacgttgattatcgagcctggtttctctcccgatcaggctgaactttcctcaacacgatatgccgttgaattttcactttctcgtcatttcaacgcgttactgaaatggttacgtaatggtgaagataaaagaggtagcgatgaatattaaaattaatgagataaaaatgacgccccctacagcatttacccctggccaggttatagaggaacaagaggttatttcgccttcaatgttagctctccaggagttacaggaaacgacgggggcagcgctctatgagacgatggaagaaataggaatggcgctgagtggtaaactgcgcgaaaattataaattcactgatgctgagaaactggagcgcagacagcaggctttgctgcgtttgataaaacaaatacaggaggataatggggcaacgttgcgtccgcttaccgaagagaatagtgatcctgatttacagaatgcgtatcaaattatcgctcttgcaatggcgcttactgccggcgggttgtcaaaaaagaaaaaacgcgatttgcaatcgcaactggatacgcttacagcggaggagggatgggaacttgccgtttttagtttactggaacttggcgaagtggataccgctacgctgtcctctctgaagcgttttatgcaacaggcgatagacaacgatgaaatgcccttatcgcagtggttcagacgcgtggcagactggccggatcgctgtgaacgggtccgtattttgctaagagcagtagcctttgaacttagcatatgcatcgaaccctcggagcaaagtcgtttggccgcagcattagtacgtttgcgtcgtttgctgttattccttggccttgaaaaagagtgccagcgtgaggagtggatttgccagttgccgcctaatacattactgccgctactactcgatattatttgtgagcgctggcttttcagtgattggttgcttgatagacttaccgctatagtttcttcatcgaagatgttcaatcggttactccaacaacttgatgcgcagtttatgctgatacccgataactgttttaacgacgaagatcaacgtgaacaaattctcgaaacgcttcgtgaagtaaagataaatcaggttttattctgatacctggctttcaatatttaggtaaattggctttctggctcatcatgaggcgtcaggatggattgggatctcattactgaacgtaatattcagctttttattcaattagcaggattagctgaacggcctttagcaaccaatatgttctggcggcaaggacaatatgaaacctatctaaactatcataacggtcgtattcacttatgtcagatactcaagcaaaccttcttagacgaagaactgctttttaaagcgttggctaactggaaacccgcagcgttccagggtattcctcaacgattatttttgttgcgcgatgggcttgcaatgagttgttctccacctctttccagctccgccgagctctggttacgattacatcatcgacaaataaaatttctggagtcgcaatgcgttcatggttaggtgagggagtcagggcgcaacagtggctcagtgtatgcgcgggtcggcaggatatggttctggcgacggtgttattaatcgctattgtgatgatgctgttacctttgccgacctggatggttgatatcctgattactatcaaccttatgttttcagtgatcctgctcttaattgctatttatcttagtgaccctctcgatttatcggtatttccgtctttattacttattactacattatatcgtttgtcactcacaatcagcacatcacggctggtactgttacaacataatgccggtaatattgtggatgctttcggtaagtttgtcgtaggaggaaatctcaccgttgggttggtcgtatttaccatcattactatcgtgcaatttattgtcattacaaaaggtatcgagagggtggcggaagttagcgcacgtttctcgcttgatgggatgccaggcaaacaaatgagtatcgatggcgatttgcgtgccggagttatcgatgcagaccatgcccgtacattaagacagcatgtccagcaggaaagccgctttctcggtgcgatggacggtgcgatgaaatttgttaaaggcgatacgattgccggtattattgttgttctggtgaacattatcggcggtatcattatcgctatcgtacaatatgatatgtcgatgagtgaggctgttcacacttatagcgtactgtcaatcggagatggtttatgtgggcaaattccatcgctgctgatttcccttagcgcgggaattattgtcacccgtgtcccgggtgagaaacgccagaacctggcgacagagttgagttctcaaattgccagacaacctcagtcgctcatattaaccgctgtggttttaatgctcctcgctttaattcctggctttccttttatcactctcgctttcttttcagcgttgttagcattgccaattatcctcattcgccgcaaaaagtctgtggtttccgcaaatggcgtcgaagcaccggaaaaagatagtatggttcccggcgcatgtcctctaatcttacgtcttagcccgacgttacattctgccgacctgattcgtgatattgacgccatgagatggtttttatttgaggataccggcgtccctctccctgaggtgaatattgaggttttgcctgaacccaccgaaaaattgacggtactgctatatcaggaacccgtatttagtttatctattcccgctcaggcggattatttattgataggcgcggacgctagtgtggtgggtgacagccagacgttaccgaacgggatggggcagatctgttggcttacaaaagacatggcccataaggcgcaaggttttggactggacgttttcgcgggcagccaacgtatctctgccttattaaaatgtgtcctgcttcggcatatgggagagtttattggtgttcaggaaacgcgttatctaatgaatgcgatggaaaaaaactactctgagctggtgaaagagcttcagcgccagttacccattaataaaatcgctgaaactttgcaacggcttgtatcagagcgggtttctattagagatttacgtcttattttcggcaccttaattgactgggcgccacgtgaaaaagatgtcctgatgttgacagaatatgtccgtatcgcgcttcgtcgtcatattctgcgtcgtcttaatccggaaggaaaaccgctgccgattttgcggatcggcgaaggtattgaaaacctcgtgcgtgaatccattcgccagacggcaatggggacctatactgcgctgtcgtctcgtcataagacgcagatcctgcaacttatcgagcaggcgctgaagcagtcagccaaattattcattgtcacttctgtcgacacccgacgtttcttgcgaaaaattacagaagccaccttgttcgacgtaccgattttgtcatggcaggaattaggagaggagagccttatacaagtggtagaaagtattgaccttagcgaagaggagttggcggacaatgaagaatgaattgatgcaacgtctgaggctgaaatatccgccccccgatggttattgtcgatggggccgaattcaggatgtcagcgcaacgttgttaaatgcgtggttgcctggggtatttatgggcgagttgtgctgtataaagcctggagaagaacttgctgaagtcgtggggattaatggcagcaaagctttgctatctccttttacgagtacaatcgggcttcactgcgggcagcaagtgatggccttaaggcgacgccatcaggttcccgtgggcgaagcgttattagggcgagttattgatggctttggtcgtccccttgatggccgcgaactgcccgacgtctgctggaaagactatgatgcaatgcctcctcccgcaatggttcgacagcctatcactcaaccattaatgacggggattcgcgctattgatagcgttgcgacctgtggcgaagggcaacgagtgggtattttttctgctcctggcgtggggaaaagcacgcttctggcgatgctgtgtaatgcgccagacgcagacagcaatgttctggtgttaattggtgaacgtggacgagaagtccgcgaattcatcgattttacactgtctgaagagacccgaaaacgttgtgtcattgttgtcgcaacctctgacagacccgccttagagcgcgtgagggcgctgtttgtggccaccacgatagcagaattttttcgcgataatggaaagcgagtcgtcttgcttgccgactcactgacgcgttatgccagggccgcacgggaaatcgctctggccgccggagagaccgcggtttctggagaatatccgccaggcgtatttagtgcattgccacgacttttagaacgtacgggaatgggagaaaaaggcagtattaccgcattttatacggtactggtggaaggcgatgatatgaatgagccgttggcggatgaagtccgttcactgcttgatggacatattgtactatcccgacggcttgcagagagggggcattatcctgccattgacgtgttggcaacgctcagccgcgtttttccagtcgttaccagccatgagcatcgtcaactggcggcgatattgcgacggtgcctggcgctttaccaggaggttgaactgttaatacgcattggggaataccagcgaggagttgatacagatactgacaaagccattgatacctatccggatatttgcacatttttgcgacaaagtaaggatgaagtatgcggacccgagctacttatagaaaaattacaccaaatactcaccgagtgatcatggaaactttgctggagataatcgcgcggcgtgaaaagcaattacgcggcaagcttaccgtacttgatcagcagcaacaggcgattattacggaacagcagatttgccagacgcgcgctttagcagtgtctaccagactgaaagaattaatgggctggcaaggtacgttatcttgtcatttattgttggataagaaacaacaaatggccgggttattcactcaggcgcagagctttttgacgcaacggcagcagttagagaatcagtatcagcagcttgtctcccggcgaagcgaattacagaagaattttaatgcgcttatgaaaaagaaagaaaaaattactatggtattaagcgatgcgtattaccaaagttgagggaagtcttgggttgccatgccagtcttatcaggatgataacgaggcggaggcggaacgtatggactttgaacaactcatgcaccaggcattacccattggtgagaataatcctcctgcagcattgaataagaacgtggttttcacgcaacgttatcgtgttagtggcggttatcttgacggtgtagagtgtgaagtatgtgaatcaggggggctaatccagttaagaatcaatgtccctcatcatgaaatttaccgttcgatgaaagcgctaaagcagtggctggagtctcagttgctgcatatggggtatataatttccctggagatattctatgttaagaatagcgaatgaagagcgtccgtgggtggagatacttccaacgcaaggcgctaccattggtgagctgacattgagtatgcaacaatatccagtacagcaagggacattatttaccataaattatcataatgagctgggtagggtgtggattgcagaacaatgctggcagcgctggtgtgaagggctaattggcaccgctaatcgatcggctatcgatcctgaattgctatatggaatagctgaatgggggctggcgccgttattgcaagccagtgatgcaaccctctgtcagaacgagccgccaacatcctgcagtaatctaccacatcagctagcgttgcatattaaatggacagttgaagagcatgagttccatagcattatttttacatggccaacgggttttttgcgcaatatagtcggagagctttctgctgagcgacaacagatttatcctgcccctcctgtggtagtccctgtatattcaggctggtgccagcttacattaatcgaacttgagtctatcgaaatcggcatgggcgttcggattcattgcttcggcgacatcagactcggtttttttgctattcaactacctgggggaatctacgcaagggtgttgctgacagaggataacacgatgaaatttgacgaattagtccaggatatcgaaacgctacttgcgtcagggagcccaatgtcaaagagtgacggaacgtcttcagtcgaacttgagcagataccacaacaggtgctctttgaggtcggacgtgcgagtctggaaattggacaattacgacaacttaaaacgggggacgttttgcctgtaggtggatgttttgcgccagaggtgacgataagagtaaatgaccgtattattgggcaaggtgagttgattgcctgtggcaatgaatttatggtgcgtattacacgttggtatctttgcaaaaatacagcgtaaacctgataagaaaaataatatgcgaacaatataatagcgttccaggtcgtgtcatgagagatacagtatgtctttacccgattcgcctttgcaactgattggtatattgtttctgctttcaatactgcctctcattatcgtcatgggaacttctttccttaaactggcggtggtattttcgattttacgaaatgctctgggtattcaacaagtccccccaaatatcgcactgtatggccttgcgcttgtactttccttattcattatggggccgacgctattagctgtaaaagagcgctggcatccggttcaggtcgctggcgctcctttctggacgtctgagtgggacagtaaagcattagcgccttatcgacagtttttgcaaaaaaactctgaagagaaggaagccaattattttcggaatttgataaaacgaacctggcctgaagacataaaaagaaagataaaacctgattctttgctcatattaattccggcatttacggtgagtcagttaacgcaggcatttcggattggattacttatttatcttccctttctggctattgacctgcttatttcaaatatactgctggctatggggatgatgatggtgtcgccgatgaccatttcattaccgtttaagctgctaatatttttactggcaggcggttgggatctgacactggcgcaattggtacagagcttttcatgaatgattctgaattgacgcaatttgtaacgcaacttttatggatcgtcctttttacgtctatgccggtagtgttggtggcatcggtagttggtgtcatcgtaagccttgttcaggccttgactcaaatacaggaccaaacgctacagttcatgattaaattattggcaattgcaataaccttaatggtcagctacccatggcttagcggtatcctgttgaattatacccggcagataatgttacgaattggagagcatggttgaatggcacaacaggtaaatgagtggcttattgcattggctgtggcttttattcgaccattgagcctttctttattacttcccttattaaaaagtggcagtttaggggccgcacttttacgtaatggcgtgcttatgtcacttacctttccgatattaccaatcatttaccagcagaagattatgatgcatattggtaaagattacagttggttagggttagtcactggagaggtgattattggtttttcaattgggttttgtgcggcggttcccttttgggccgttgatatggcggggtttctgcttgatactttacgtggcgcgacaatgggtacgatattcaattctacaatagaagctgaaacctcactttttggcttgcttttcagccagttcttgtgtgttattttctttataagcggcggcatggagtttatattaaacattctgtatgagtcatatcaatatttaccaccagggcgtactttattatttgaccagcaatttttaaaatatatccaggcagagtggagaacgctttatcaattatgtatcagcttctctcttcctgccataatatgtatggtattagccgatctggctttaggtcttttaaatcggtcggcacaacaattgaatgtgtttttcttctcaatgccgctcaaaagtatattggttctactgacgctcctgatctcattcccttatgctcttcatcactatttggttgaaagcgataaattttatatttatctaaaagactggtttccatctgtatgagcgagaaaacagaacagcctacagaaaagaaattacgtgatggccgtaaggaagggcaggttgtcaaaagtattgaaataacatcattatttcagctgattgcgctttatttgtattttcatttctttactgaaaagatgattttgatactgattgagtcaataactttcacattacaattagtaaataaaccattttcttatgcattaacgcaattgagtcatgctttaatagagtcactgacttctgcactgctgtttctgggcgctggggtaatagttgctactgtgggtagcgtgtttcttcaggtgggggtggttattgccagcaaggccattggttttaaaagcgagcatataaatccggtaagtaattttaagcagatattctctttacatagcgtagtagaattatgtaaatccagcctaaaagttatcatgctatctcttatctttgcctttttcttttattattatgccagtacttttcgggcgctaccgtactgtgggttagcctgtggcgtgcttgtggtttcttctttaataaaatggttatgggtaggggtgatggttttttatatcgtcgttggcatactggactattcttttcaatattataagattagaaaagatctaaaaatgagtaaagatgacgtaaaacaggagcataaagatctggagggcgaccctcaaatgaagacgcggcgtcgggaaatgcagagtgaaatacaaagtgggagtttagctcaatctgttaaacaatctgttgcggtagtgcgtaatccaacgcatattgcggtttgtcttggctatcatcccaccgatatgccaataccacgcgtcctggaaaaaggcagtgatgctcaagctaactatattgttaacatcgctgaacgcaactgcatccccgttgttgaaaatgttgagctggcccgctcattattttttgaagtggaacgcggagataaaattcctgaaacgttatttgaacccgttgcagccttgttacgtatggtgatgaagatagattatgcgcattctaccgaaacaccataaatgcttttggtatgcttcttcaggccactgcgaaggttaagagggtaatagcgtatagagcagtgcttgacgataaaggtgagagactgaaaataatcgcttttagcctggcacaagcaccagatagcgtattataaaattaaacaagataatggattggtgcgtctgaatggactcgaaccatcgacccccaccatgtcaaggtggtgctctaaccaactgagctacagacgcattaaaatgatggtgcgttcaattggactcgaaccaacgacccccaccatgtcaaggtggtgctctaaccaactgagctatgaacgcaacgttgtaggtgacaacggggacgaatattagcgtcacaaccgcaatgaggcaagagggaaatcgcaattttcttcctgaaatcacctgattgcggtggaaatatgcaacatgtcgagaaaatagccgccatgcgacggctatcgtcgtattatcgcgcagcgcgctgcaaaatgatggcggacggctgacgttgtagatagcgcatccgtagcatcattaacaccgccgccgaggtcaggccgatgatgaaccccatccagaagcctgccggtcccatacgatccaccaccaaatccgttaacgccaggatataaccgctgggtaaacctaacacccagtaggcggtaaaggtgataaaaaagatggaacgcgtatctttataaccgcgcagaataccgctgccgataacctgtatagagtcggaaatctggtaaaccgcagcgagcagcattaattgcgcggcaagcgccacgacctcagggttgtcattgtagagcaaagcaatatgcttacgcagagtaacggtaaaaatagcggtaaccacagccatacaaatgccgacgcctaaaccggtacgcgctgcggtttgcgcatccagcgttgagccctggcccagacgataacccactcgaatcgttaccgccgcagccagcgacatcggcagtacgaacatcagcgagctaaagttaagcgcaatctgatgaccggcgacatccacaatacctaatggcgaaaccagcagcgcaacgaccgcaaataacgtcacttcaaagaacagcgccagcgcaatcggcaaccccagttgaatcaggcgcttcatgacgacgctatcgggtttgccaaagcctttttcattacgaatatcacgcattgaacgcgcgtgtttaatgtaagaaagcatggcgataaacatcacccaatagaccgccgcagtcgcaacgccgcagccgataccgccgagttccggcataccaaaatggccatagataaaaatatagttcaccggaatattcaccagcaggcccaaaaatcccatcaccatacccggtttggttttggccagaccttcgcactggtttcgcgctacctgaaagaaaaggtatcctggcgcgccccacagcagcgcgcgaagataacccacggctttatcggccagcgccggatcaatattatgcatagagcggataatgtatccggcattccacaggacgatcatcaccagcacggagacaaagcccgccagccagaacccttgtcgaacctgatgcgcgatacgctcacgacggccggagccattgagttgcgcaatcacaggcgtcaaggccagcagtaagccgtgaccaaacaaaatggcgggaagccagatagaggtgccgatagcgacggcagccatgtccgtagcgctatagcctcccgccatgacggtatcgacgaatcccattgcggtctgtgccacttgcgcaaggatcaccggtattgctaacgctaataactgacgcgcttcactggtatacttctgcacgtattcaccttttattttgttgttatatgaaagactaaaaagccgccgaagtggcagccaaaagaaatagcaggggaaatttcagtctattgtagcggggtattactatttctccagtgaaaaaacagttgttaacggcgcattgctggcaagctgtttttccacctgctattgtgctgaacagttctgcttttatttatttcaggagttgaagatatgtttacggggatcgtacagggtaccgcgaaactggtatcgattgatgaaaaacccaactttcgcacccatgtggtgacgttacctgactacatgctggaggggctggagacgggggcgtcggtagcgcataacggatgctgtttgacggtgactgaaataaacggtaaccagataagttttgatctgatgaaagaaacgttgcgcatcaccaatctgggcgcgttgagggtaggtgatgaggtcaacgtagagcgcgccgccaaattcagcgatgaaatcggtggtcatctgatgtcggggcatattattacgacggcggagatcgcgaaaatcctgacctccgaaaataaccatcaggtgtggtttaaagtgcaggatgcgtccctgatgaagtatatcctgtacaaaggctttatcggcgtcgacggcatcagtttgaccgtcggcgaggtaacgccaacgcgcttctgcgtgcatctcattccggaaacgttggaacgtactacgcttggcagaaaaaaactgggtgagcgtgtgaatatcgagatcgatccgcaaacgcaggcggttgtcgataccgtagaacgcgtactggctgcgcgagaaaatgcggtcagaaatcaggccgacattggctaacggaaaataagattcccccgcatgaaatgcgggggagatgattagcgaggaacgcgcagtccgttttcaacgccgcgcgtaaataccacctgccaaagctggatatcacgcgcgcgaaacgcacccgcgcaggcgttgagataatagctgaacatacgtttaaagcgctcgttataattgcccgcaatctctggccaggcattgataaagcgctcatgccacgccatcagagtcgtgtcatagtcggcgccaaagttatgccagtcttccattacaaagtgtgattcgctggcctcggcgatttgacgaacagacggcaaacaaccgttggggaaaatatacttattgatccacggatcgacattatgatcggtttttttagaaccaatagtatggagcaggaaaagaccatccggttttaaattcctgtcaacgacctcaaaataggtgttgtagttttttggcccgacatgttcgaacatgccgacagagacgattcggtcaaactgatcgttaaggtcgcgataatcttcgaggagaatggagacatccagaccttcgcaacgcgtctgcgccattttttgttgttcagcggagatcgttacgcccaccacgctaacgccataatgggtcgccatatattgcgacaggccgccccagccgcagccgatatccagcacacgcatccccggttgtagctgtagcttttcgcaaattaatttcagcttggcttgctgtgccgcttccagcgtatcggcatctttccagtaggcgcaagaatattgcatatagggatcgagcatacgggaaaaaaggtcattaccaagatcgtaatgttccttgccgacaatccaggcgcgttttttactttgtagattaatcagacgcgcgccgaggatacggagcgtatctttaacatggtgggggagttgattttcaagaccggcacgtaagactttgctgaagaaaatatccagacgctcgcattcccaccagccatccatgtaactctcacctaaccccaacgatccttcctgaaggacgcgtttaaaaaaatcgggattcttaacacgaatgtcagacggggcggaaccattaattgtaatatccgcgcgacttaacaattcgttggcgattcggtaccagttatcatccggtacgctgacttcttctatacacgatgaactcatagtttctccatcactggacggtgatcagaaccttaaaacagcgtagacgcttttttggctttgtgagaaatcccacggacaattccgtgagccagttatccgacgtagaacagaggaagggaggagcccttgccgaaaaggccatccatggtgaatcgggaacgctccggttcccgttaatgcctaataattatcgtaatataaacaaccgggaatcagtataggccgcaatttttgatgattcaaccgaaaattgttagcgtgctaattaccagcggttaacaagtctttagtgagacttgtcgtgggcgacattggcatggggaaatccggtctcagcgcaatctgcatgagactgcattttgtaacctaacgccgccagaacaacggtagagagcattacgctggtggtggtcagcagcggcgtgctgatgagccatgaaaccaccaggcttgccaggaaacataaccccagttgcagcgtattttgtagcgccgcagcgcgccccgtggcttgagggaaagggcgtaacgcttgcgcgacgacgatagggtagatggcaccattagcaatcgccattacgcagaaaggaatcaggatctccaccagtgaggcattattcagaaggcccgctccccaggtggcgataacgctcagcgcatacagccctaacagccacggaagcaattggtagccctgccatttttgtagcgccgcgcggcaaccatatccgccaatcagaaaagcgatggtttgcggaacatagctcaggccaatcactgccgggctgtaacccatcgcgctgagaataaatggggaccctgttagccacgcaaaaaagctggcggaacaggcggcataaatcagcacattaccgcgataggttttagagcgtaacaacgtcgcgaaagtgagtttatcctgtccttcggtacgcgcttttcccgatggttttaagcgcagcgctggcaacatcagcaacaacgtaatcacgaacagggtggcgaaaatcgcctgccatgagaaatgcgtcagtatccagcttcccagtaagggcgcaagcgccggggataagcccaccagtggcatgatcgtggcgaagatacggttaattttttgcgaaggataataatcggtcaccagcgcttgccagattaccgttgccgcgcaaacgccgacggcctgcacgaagcgcagcgtcagcagtgctgccgcgctttctacccacagcatccccagacttccgagcgcaaagatagataaccccagcagtaaaatcggtttacggccataacgatccgatagcggtccccaaagtagttgcgcgacggcaaagccagctaaaaacaggctgaggctggcgctgaccgcggcggcaggcgtttgtaaatccgcctgtatggcggcaaacgcgggtaggtacatgtccgtagccagaaatcccagcacgctaaggccggctaaccagactaaaaaaccttttccaggttgcatatttgtttctctttcttatcagacagacattgtcgcagagtgtagggagtgaaattacggttgtgaaacgttaatatttgtccagtgaattcaaaatttttgtaggcaaattatgtggtcggaatactcgcttgaagtggttgacgccgtggcgcgcaatggcagttttagcgcggcggcgcaggaactgcaccgtgtgccttcagcagtcagttacaccgttcgtcagttagaggagtggctggccgtaccgctttttgtacgacgtcaccgtgatgttgaactgacgcctgctggcgtctggtttttaaaagaagggcgttctgttatcaaaaaaatgcagatcactcgccagcagtgtcagcaaattgctaatggctggcgcgggcagttagctattgcggtggacaatatcgtcagaccagaacgtacccggcagatgatcgtcgatttctatcgccattttgacgatgtggaactgctggtttttcaggaggtgtttaacggcgtctgggacgcgctctccgacgggcgtgtcgaactggcgattggggcgacgcaggcgattccggtaggggggcgttacgcttttcgggatatggggaccctgagctggagctgcgtagtggcaagcgatcacccgctggcgtcgatgcctgggccgttaagcgatgataccctgcgcaactggccgtcgctggtcagggaagacacttcgcgaaccttaccgaaacggattacctggctgctggataaccaaaaaagggtcgtcgtaccggactgggagtcatcggcaacctgcctgtcggcaggactatgcgtgggaatggtgccgacgcattttgcccgacagtggatagacagcggaaaatgggtggcgctgacgttagagaatccgtttcccgatgcggcctgttgcgtgacgtggcagcaaaacgaggcctcgcccgcgctggcatggctgctggactatttgggcgatagcgaaacgttgaatcgggagtggctgcgggagccagaagaggctcccgacagcggggattaacgccgatagtcgcggaacgggccgtcagcgaccgagcgacgctcaaccaggcgtggatgaacttcaatagactgtgactcttcacgcttattgacgatgcgatccaatagcatattaaatgcggtttcgcctaaagagtctttgggctggtgaatcgtcgtcagcgccggggtaaagtaacgggcgttacgcacattgtcataaccgatcaccgaaacgtcctgcggtacgcgaagccccatttcgtcagccgcgcaaagcgcgcccatcgccataatatcgccgccgcagaaaacggcggtagggcgatgtgactgcgataaaatttgctgcatcgcgtggtaaccggattccggctcgaagtcgccctgaacaatccagttgtccggcacgttgatcagcgcctcctccatggctttcataaagcctgccagccggcccgcgccggtgttgcgctccagcgggccgggaataacgccgatatcccggtggccgcgctcaaccagataacgacccgccatatagccgcctgcaaaggcgttatcaatcaccgtgtcggtaaaatcggccttcgcctcgccccagtccatcaccaccatcggaatatggcgatactcttccagcatggaaagcagaggttctggatactcagaacacatcaccagcaggccatccacgcgcttttgcgccatcatggacaggtaggcgcgctgtttttccaggttattccaggcgttgcctaaaatcagcgtatagcctttctggaaacagtttttttcaaccgcctcgataatttcggcaaaataggccgcttcgctgctggtcgccagtaagcctatcgacttggtatggttaaccttcaggctacgcgcgacggcgctgggagagtagtgcagctctttaattgccgcccagaccgcgttacgcgtttcttcagcgacaaaacgcgttttgttgattacgtgtgatacagttgtagtggaaacgtttgcccgtttcgctacatctttaattgttgccattacatttcactccagaccctcgctaagctcctgagaaacgccaggtaaacgtttgcctacacacaccctaatcgcaacatcagggttgcggcacgccggaaaaacgacacggaacgtcaggaaggggtcaatggccgttacgctaattcagtaagcctggaattttgtctgatcttgaggaaaaggggaagcgttaaaaacagttatcaatataaaacatgagagatttttgtgcgggaatgtgcaaaaatgcgctatatcactttttgtgtgggaataaaaaggagaaaacttgatgagtaccgacctgaaattttcgttgattactacgctgattgttctgggcgtgattgtcgcaggtggattaacggccgctctgcactgatttcctctcttctgagggtgggcgtctcctctattctatccctctctaaaacgcagaaggcgtaccttctgcgtactcagacttatgcggcgagatttttcgcaacaaattcccagttaaccagcgcccagaaatgctccagatagtttggacgggcgttgcggtagtcgatgtaatacgcgtgttcccacacatcaaccgtcagcaacggcgttgcatccgtagtcagcggcgtaccggcatttgaggtagaaacgatagccagtttgccatcagcgctttttaccagccatgtccatccggaaccaaagtttttgatagcggcatcggtgaattgcgctttaaattccgcgaagctgccaaaagatgccgcgatagcatcagccagtttcccggtcggttcgccgccagcgtttggcgccaggcagttccagtagaaggtgtggttccacacctgagcggcgttattaaagatgccgccttcggaagtgcgcacgatctcttccagcgatttgccttcaaacgccgtgcctttgatcaaattgttaagattggtcacgtaagtctgatgatgtttgccatagtgatattccagcgtctcagcagaaatatgcggcgccagagcatctttggcatacggtaatgcaggtaattcgaacgacattgcttctctccttattattaatattgcgcacgcacaatacccctggtgcgcgtaaggatagggtagcaaattgagcggtggcgcaaaagaagaagttatcctgtcgttaaacgacaggataaaatattagcgaattgttttaggcgtcatcacccggcgggcgccgacataatgacgttgccagtattcttcgttcagtgaggtgatcttaatttcctgaccgctgcgcggagactggataaacttaccgttgccgacatagacgccaacgtgatcggcggtgccgcgcccctgcgtacggaagaacaccagatcgccgtttttcaactcgctacgctcaatgggcgccgcgtcacgcaggtgatacatctcattcgccgttcgggggatacggatcttcactaaatctttataggcataataaaccagaccgctgcaatcaaaaccggtgcgcggcgacgcgcctccccagtgatacggtttaccaatctgattcatgagtttggacatcgcggttttcgtcgctttttgtacttttgcacgatgcgcatcggcaatagagaccggcaatgttcctttccccttcacgcagtgcggcttacggcctttacgcgtcgtgcatttttccgttacgtcgagggcggcgattgacgtgggcgcggttctgttacgacgatgcgtcgtatgacgagatttcgtggaggcggtggtacgttttggcgtagaagcggaagaagaacggctggtttttgaggttttttttacgttttttttgctggttttactgatctttttcgttgtgcttttctttttatctgccgttttcgtgacatgagaaacagcaggcgtcgctttggcttgcctggaagcatgggccattggcgtaaaggggagagtagtaaaaagtaaagcacagagcgtgatcgagattttgtttatccgcgccactgagcaatcctctgttaaaggcaggcgattcatgcctgcgtatgatttacaaaacctgataattctaatctacaaaagcacagattggtaattgcttttggtttctgaagctgtgtttcgttaacagatgtaaaaaaatagcaattaatgctaaacacgaacgcgttatctacaaatcactgcgcggcaacccgcttaaaagatattttgtatacaacttattcccgcagacggtaaaataataaggcatgatgaaaatgttattttccgttgccagcctgacccgttacaatgacaggcttcagtcgtaaaagtagtttaaggaagcgagacaatgagcaccactatcgaaaaaattcagcgccagatcgctgaaaacccgattctcctgtatatgaaaggttcaccgaaactgccaagctgtggtttctctgcgcaggccgttcaggcgctttcagcctgcggggaacgttttgcctatgttgatatcctgcaaaacccggatattcgcgctgaattaccgaaatacgccaactggccgacattcccacaactgtgggtggacggcgagctggtcggcgggtgtgatattgtgattgaaatgtatcagcgtggtgagttgcagcagcttattaaagaaactgcggcaaaatataaaactcaggagccggacgcagagtaatctgtgcaaggagaaagcgacctgtaaaggtcgcttttttaccgccatcgtgagcaagagcggcgttgttagcctcgttatttgtccgtcggcaaaggtaacggccagccgcccaggcgcttccagcgattgacaatttcacaaaacagcaccgctgtccgctcggtatcatacaaagcggagtgggccttttcaccgtcaaactccatacctgccgccaggcacgcttttgataacaccgtttgtcccagcgccagtccgctcaatgccgcagtatcaaaggtgacgaacggatgaaacgggttacgtttcagcgaggcgcgctctgcggcggccatcataaaactgtgatcaaaagtggcgttatgcgcgaccataatggcgcggctacaaccgctgtctttgatacctttacgcaccattttgaaaatagcgtgtagcgcctcatattcactcaccgcgccgcgtagcgggttagagggatcgataccgttaaacgcaagcgcttccggctgtaagttggctccagcgaacggctccacatggaaatgcagcgtcatgtccggcatcagccagccttgttcatccattttcagcgtgatggcggcgatttcgagcagcgcatcggttttagcgttaaatcctgcagtttcaacgtcgatgacgacaggataaaaaccacgaaaacggtcgcacagaccggaaagttgagcgttatcggacatctgagtctcttaatacgaaaaaatgcagcgcgtattatggcaaattttacgccgggatgcagtaaaacaacgggcgcagtgacctgcgcccggcgggggatcagttacccagaccgcggcctgcgtctttagcttcaatcaattcgattttatagccatccggatcttcaacgaaggcgatgatggtcgaaccgccttttaccggccccgcttcacgggtcacgttgccgccgttctgacgaatgcgttcacaggcttcagcagcattgtcaacgctcagcgcgatatgcccgtacgcattgcccatgtcgtagctctcaacgccccagttataggttagttcgatgaccgcttcttccgtttccggaccatatcccacaaaggccagcgagtatttgtattccggattctcactggtacgcagcaatttcatgcccagaacgttagtgtaaaaagcgatggaacgctgcaaatcgccgacgcgcagcatagtatgcaataaacgcattttcgttgtccttaaaatagtcaagatattcaaagtatagcggcgatgtgaggccgctatcaatgaaattacagagtagggtagtcagtgtagccttccgcgccgccgccataaaaactttcgggacgctgtggattaagttccgctttacgttgcagacgcgctaccagatccgggttagcgatgtaatcacgaccaaacgccacggcgtcaatcagccctttttcgatcagatcttccgctttttctggcgtataggcgccagcgccgatgatgggaccgtggaaacgcgcgcgcactttttcacggaacgcgtcgctgtacggttcgccgcccgcccagtctggttcagacatatgcagataagcgatgccgcgtttgcctaacgcttcaatcagataaagggcgtcagcttcttcattcgggccgttatcgacattctggaaagtgccgacaggagaaaggcggatgccgatacggtccgcgccccattccttaatgccggcatcaaccacctccagtaccagacgggcgcgattctctacgccgccgccgtaccgatcggtacggtgattagaagacggtgagaggaactggtgcagcagataaccgtgcgcggaatgcagctccaccagatcgaagcccgcctctcgggcattggcgatagcctggcggaaatcgttgacgatcccggggatctcgtgagtatccagcgcgcgcggcgtggaagtctctacgcggatggcctggccgttttcgtcacgcaaagaggtgcgggttcccgcattgatagcggatggcgcgacgggcgcttgtccgcctggttgcaggctggcgtgtgaaatacggcccgtatgccacagttgcaccgccatatggccgccctgggcatggactccctgagtgatttttttccaggcggcgatctgctcatcgctgtgtaatcccggtgcgccggcatagcctttcgcctgtgcggagatttgtgtggcttcgctgatgatcaatccagcgctggcgcgttgacggtaatattccgccattaacggcgtaggaatgtcgcccggttcaatactccgcaaacgcgtcaaaggcgccataaatacgcgatttgtcgccgtgatggcacccaccttgaggggggtaaacagttttgctgatgacatagtggctcctgatataagtagaccggtcgtcttgtaataaaggaaataaaaacgcctgttactgctcaggcgttgcaatgatggtcttaacatgcgccaacgcattttccagcggcgcggcgctacgggatattttggcctgcaaattggcgcccagccacagggcataaagtacctgcgcctgtggcaacggctggccggtgaaatgtaaacagtggctattacggccatcttccagcgcgcgtgcaagcagtgccatgatctcctgcgcccctttatccatcgtagagcgcatatcctccgacagatcgcagacttccgctgacagtttcaccgtcaggcaaccgctgatggcgccttgctggcaaaactgctttaacgtttcctgataccaggcgagaagacgatcgcgatgattaccgggaccggaggtgaagtgcgccgtaagacgctgatgatagcaggcgtaatgtcgctcaagcatggcgacgccgaaggcttctttcgagcgaaagtagtgataaaacgaccctttaggcacttgggcggttttgagcaactcgctaagccccatgccggtaaaaccccgttgcatacaaagctgctcgccggtggccagcagatgttcgcgggtatcgtgttcggtttgcttattcatagcaggcagtatagtagaccagtcggtctactacaagcagagttgccataatgtcagttagcgtcttcaatagtcataagcgtcaaacgttgaggaggggatgtggccgagcagttggagttttttcctgtagcaagcccatgtcgcggtatctgccagtctgatgagcgtggcttttgtcggggctgtatgcgcagccgcgacgaacggtttaactggcaaaaaatgagcgatgtcgagaaacaaaatgtactgcggctttgtcgccagcgtttcttgcgtaaaatacgcgcaaataagcctctcccatcggaagatcctcaacaaccttcactcttttaaacgcggaattgcgtatactcaacctcattattctctatgaggaatctgttatggttcagcgtgtcaccatcgctccacaaggcccggagttttcgcgttttgtcatgggttactggcgtttgatggactggaatatgtccgcgcgtcagttagtgagttttatcgaagaacatctggatttgggcgtcactaccgttgaccatgcggacatttatggcggttatcagtgcgaagcggcgtttggcgaggcgctaacgctggcgccgcatttgcgggaaaaactgcaaatcgttaccaaatgcggtattgcgaccactgccagagcggaaaataagctcggtcattatattaccgatcgccgccatattattctgagcgccgaacagtcattaaaaaatctggcgacagattatctggatatgttgttaattcaccgtcccgatccgttaatggatgcggatgacgtcgccgaggcgtttcaacatctgcaccaaagcggcaaagtgcgccattttggcgtttctaattttacgccagcgcaatttacgttgctgcaatcgcgcctgcctttcaccctggcgaccaaccaggtggagatctcgccggttcaccagcctttgttgctggacggcacattagatcaattacagcaactgcgtattcgtccgatggcctggtcatgtcttggcggcggtcggctgtttaatgatgaggcttatcagccgttgcgccaggaactttccgttatcgcgcaagaactcaacgccagttctattgaacaggtggtctatgcctggattttacgtttgccgtcgcagccgctgccgattattggctcgggtaaaatcgaacgcgtacgcgccgcactagaagcggaaacgctgtcattgacgcgtcaacagtggttccgaatccgcaaggcggcactgggttatgacgtgccgtaatcgccaactcgttgactttccgtacatgttttcgccagtggtttacacttaacaggcgaccacatgtaacggaggttttatgaagcgattaagtttagcgatggtgacgctgctggcctgtgcgggtgcgcaggccgccagcgagaaagtagagatgaatctggtgacggcgcaaggcgtaggacagtctatcggcaccgtcgtcatcgatgaaaccgaaggcggcttaaaatttaccccacaccttaaagcgttgccgccgggcgagcatggttttcacattcatgccaacggtagctgccagcccgcgattaaagacggcaaagcggttgccgcagaagccgctggtggtcatctggacccacaaaataccggcaagcatgaaggaccggaaggccaggggcatctgggcgacctcccggtgttagtcgttaataatgatggtatcgccagcgaaccggttactgcgccgcgtctgaagtctcttgatgaagtgaaagataaagcgctcatgatccatgtgggcggcgataacatgtccgatcagccgaaaccgctcggcggcggcggaatgcgttacgcctgcggcgtcattaaataacccggagccagtgttccctgcgctggagcctgttccagctgcgacagcgaacagtgtaaacgccagataatcgccgccagctcatgcgcggcgggttgatgatgatgtgcgagcgtgtcgcagatacgctgtagttcctgtagcgtgacggcaagcgggcgttgctgcacgccgcgctcgctcatcacatcgcgcagcagggatatacaaatatcccgcacccgggaaagcggatcggaacgcgactcccaggcgcgcagctgccacaccacatgcgagcagttcagcagcaccactccccaacgtaataaccaccggcgcgccagcgcatcctgactattgctgagctgactgacgtgatgataggtcagcgattcaaactcgctttcgttatgggaagggtgacggctaagctgatcgacgaaatcccggcgtagcgcgcggatatggcggcggctttttacggcatcggaaccggggcgcaaaatcgcaaacgccagccaggaaatcgcgacgccgacgatcttggcggtattatcgttaaggaagtcggcgaagtcgtacaccggtggattggtcacggcgatgaatgagcccataaaaacgataagctgcccccacagtcccgccagcttaggcatctgcagtttaagcagttgcatcgtgacgaacagcggaaaaaggaaaagcaagaattgccacagatcggtgatttgcaccatcaggccaaatttcaccacgaagctgaataaggacagcagcactaaagtacgcatcaataaggaaagcgacttaaacggcgtggcgacgatggagtagaggacgcaactgatcgccgccagggttaatgcgccgggcccggattcccattgcgcgccaatactccaggcgccaatcaccgtgagcgtgcaaaaggtacgcacgccgctccagatggcctctgcgttatccgtatgccgcgcaaggccgggagtgcggcggatatggatttgatccaccggcgcgccgctttcgatcagatataactgacggctgctgcgcagatatagctggcaaaaatagcgtaatcgctgccagaacgcgaggtgacgataatcctgttcatcctgcgggcgtagcggcgcaataatctgcgccacggtgtagctgtccgcgcgcggttttgccaactcagctaagagttgctcaatgacttcgcggctgttttccggcggcgtcggccagtttaaaagcattctacgcagactggagatcacgctggttaaccgtaattgctggtgtaacaatgcatttagcaatgcattctggcggcgaaaacggtagtgactccagaaggcctgaatacgcagcaggttcatggtcaggatttgcccaatgaccccctcatgcgcggagcggatagcgtcagtagtctccggctgccacagtagactggcatgttccagcaagcgcgcatgcatgtttttaaacgcggtgagcagggcggtaccatccgatgtgctgggtaggatcatcatcatcatgccgccacagaggatgccgacgataacttcacatacacgtgcctgggcgatatcccacaactgcgtgatttctacaatattaaccatcgggaacgcgatgatcgccgccgtgtagccggacaactggaaagcataagcggcattattggtaaaatgcgcgcaggcccaggtacaaaaaccgatccaggcggccatgctaaataagaacaaccagggttcattcagcgtatggccagcaataattaacgcggcggtcgcgccgagtaaactcccggcaatacgccccagacttttactgattacgccgcctacggtcggaaagctcaccactgcggccgaagtcattgcccagtagggctcatccagattgagataataagcgaatgtcagcgcgagacacatggcaatggtattgcgcaacgcgtaacgccactggccggaggtcgctttaaaccagggcgtatttcgcagggccggcagggagagtttcattaccgctgtccaatggctacgctgcaggtagtgccggagacgagcgtgatatcctgcggtaaagcgtcaaattcgatacgtaccggtacgcgttgcgccagacgtacccacggtacgttgggtttgatatcgggcactaaaccggagtcactttccacgctttggtcgtaaatagcgcgcccgatactgccaacgtgaccctgtaacttaacattgccactatacagtgttattaatgcaggctcaccttcgcggatatggcgtagtttggtttcttcgaaatatcccattacataaaatgaatggctatctaccagggcgaaaagtggcttaccggtgctggcataatcaccggtacgcgtggaaaggttggtcacccagccggataccggcgcttttacttccgtctggctaagctgccactgcgcctgttttaacgttgccagtgcgacatctacgttggcctgcatcgctttaacattcagattggcgctatccagatcttcagcagagatgtagttacgcgataaatgtcgacgtcgatcggcttcattattcgcttttgccagatcggactgcgctttggccaactgcgcctgcgcgttaagttctgcaatatggaagggcgttttatcaatgacaaagagaacgtccccggcgttgacgaactgattatctttgatattgagttgggtaatgctgccagaaacctgtggcgttacgctgacctgttccgcgcggattttaccatcgcgcgtccacggtgactgcatatagtaattccataaccaccacgcggccagaacggcgacgacggcgacaatgagagtagaaaaatattttattgtttttaacgacatatttaccacgcgatcagtaaaacgaggcccagacatacgcaaagcgtaaagagggagagatccattaacaggggatgccagatttcatcagagtatatccggtcacgcaggagtcggtgaataaacaaccagataacgaacccaagcgcaaaggctttaaagaatggcggaaagtaaacagatgctcccaacatgagatcttgtaagggcaatcctgtggcgttgagtatacacttcacaagcaatgttcctttgcgtcagacatcgatgctttagttttagccaaaactgaagctacaggtgccaagtgcgcactatgtctgaaaaaatgtctattggtaagcaaatttagcaatacatttgttttgagaatacaaatactgcacactattctaaaatcagcataataacttagcaagctaattataaggagatgaaattggaatcgccactaggttctgatctggcacggttggtgcgcatttggcgtgctctgattgaccatcgcctcaagcctctggaattgacgcagacacattgggtcacgttgcacaatattcatcaattgccgcctgaccagtcgcagattcaattggctaaagcgataggcattgagcagccatcgctggtacgcacgttggatcaacttgaagataaggggctaatttcgcggcaaacctgcgccagcgatcgtcgcgctaagcggattaaactgaccgaaaaagcggagccgctgatcgctgagatggaagaggtcattcataaaacgcgcggtgaaattttggctgggatttcttcagaggagattgagcttctgattaaacttatcgccaaacttgaacacaatattatggaattgcactctcacgattgaggtgcaggggcatacgtgtggccatgtgaccacacgtaaagcctggtttagcgtggagagacggtaacctggctgccgttgctggccagcacgacacgctgacctgccgagaaacgcgtatttccttgtttctgcacaaccataatggtgttgccatcgtctttacgaatttccagttccacaccctgggttttattcattgcgctctggacgccctggcccgctacgccgccagccaccgcgcctgccgcggtcgccagtgaacgacccgtaccgccgccgatagtgttgccgaggaatccgcccaacaccgcgccgccgatagcgccaatcacgttagaatcatcaccgccctgaatttgaaccggacgaacgttaacgatagtaccgtacgttacattctgaacttgtttagcctcggatgcggtataaacatcacccgaaaggctatcattgttaacacaccccgctagggataaccccatcagtgaaacggccagtacacgtttaatcatttacccatctcctgttcttcacgaaacgctatttcagcatccctatagctaaattatatggcatttatgcagttaaggtcatatcttctgccgaaagaatgtgaaaatcataatcagaagttaattaaccaatcttaaacgaagtcggaagcaagaaaagataggtcattgatatccgtggacgacacggcaaaaaatgtgacgtgggcatagcattacaaaatacgttatgccgagtgttaaggcttaacccagcttaaaaggaagaggtatgaaatcgggccgttttattggcgttatgtccggaaccagccttgatggcgtggatgttgtactggcggcaattgatgaaaccatggttgcgcaacaggcaagtctcacctggcccattcccgttcatctgaaaaaaggcattctcgatatttgccagggacagccgcttacgctctcgcaactcggccagcttgatacccagttaggccggctttttgcacaggcggttaatgcgctgttagcgcaacaacgtttgcagccgcgggatatcgtcgccattggttgtcatgggcaaacggtctggcatgaaccgaccggcgaggccccgcatacgctgcaaattggcgataataatcacatcgtcgcccatacggggattacagtggtcggcgattttcggcggcgggatattgcgctgggcggacaaggcgcgccgttggtgcctgctttccatcacgcgctgttgggacatccgacggaaaaacgtatggtcctgaatatcggcggcatcgccaatttatctctgcttttccccggacaggcggtgcgcgggtacgacacggggccgggtaatatgttgatggatgcgtggatttggcgacaatgcgcgcagccctacgacaaagacgcggcatgggcgaaagaaggtcaggttattcttccattgctgcaaaagatgttgcgcgatccgtactttgctgcgtcggcgcccaaaagtacaggacgcgaatatttcaactatggctggttagagcgccatcttgcggctttccctggcgcagacgcgcgcgatgtacaggccacgctggcggagctgacggcggtctccatcgcccaacaggtgctgctcaacggcggctgcgagcggctgatggtctgtggcggcggtggccggaatccgttagtgatggcccgtctggcggcgctgttgccaggtatcgaggtttcgaccaccgataaggcggggatcagcggcgatgatatggaagcgctggcctttgcctggcttgcctggcgaacgctcgcgggcctgccgggaaatttaccttccgtgacgggggctacagaagccagtgttttaggcgctatttacccggctaacccaataactcagagttaactgaatttttcccggaccctatatcggtaaactagcaaggtcaggaaggggcgtttgcccttccagaagcaggagagctttcgggatatgcctatgaaaaagatcgcaataatgtgtttacctgtgctgctgaccggctgtagcgtttatcaacaatttgttgaacgtatgcaaacggatacgctggaataccagtgtgatgagaagccgcttaccgttaaagtcaataacccgcgtgaagaggtcagttttgtttatgacaataagctgctgaccctgaagcaaggaatctcggcctcgggcgcgcgttataccgacgggatttatgttttctggtcgcaaggcgagagcgccacggtctataaacgagacagaattgtgcttaataactgtcagttacaaaatccgaagcgttgagattttcagtatgggggcgcacaatagcgccacccactgattatttctgatcaacgccatgtctgataacgaccaattgcagcagatcgcgcatctgcgccgtgaatacacgaaaggcggcttgcgtcgccgcgatttacccgctgaaccgttaaccttatttgagcgctggcttgggcaagcgtgcgacgccagactggccgatccaacggcaatggtcgtggcgaccgtagatgacaagggtcaaccgtaccagcgtattgtgttgctcaagcattatgatgaaaaaggcctggtcttttataccaacctgggaagccgcaaggcgcatcagattgagcacaatccgcgtatcagcctgttatttccctggcatatgcttgaacgccaggtgatggtgacaggcaaagccgagcgtctctccactcttgaggtggtgaggtatttccacagccgtccgcgcgacagccagatcggcgcatgggtctctaaacaatccagccgcatttccgcgcgcggtatcctcgaaagcaaattcctggagctcaagcagaagtttcaacagggcgaagtgccgttacccagcttttggggtggttttcgcgtgagtatcgaacagatggagttctggcagggcggcgaacatcgtctgcacgatcgctttttataccaacgcgacgacggcgcgtggaaaatcgaccgtcttgcgccctaaagatgcaaaaatcttgttttaagcactggtgcggatgaatccgccgttttatgctatgtctctttcgcgtctggcgaaaagtcgtgtaccggcaaaggtgcagtcgttttatacatggagattttgatggcaagcagtaacttgattaaacaattgcaagagcgggggctggtagcccaggtgacggacgaagacgcgttggcagagcgactggcgcaaggcccgatcgcgctctattgcggcttcgatcctaccgctgacagcttgcatttggggcatctggttccattgttatgcctgaaacgcttccagcaggcagggcacaaacctgttgcgctggtaggcggcgcgaccggtctgattggcgacccgagcttcaaagccgccgagcgtaaactgaacactgaagagaccgttcaggagtgggtggcgaaaattcgtaaacaggttgccccattcctggactttgattgcggcgaaaactccgccatcgcggccaataactatgactggttcggcagcatgaatgtgctgactttcctgcgcgatatcggtaaacatttttccgttaatcagatgatcaacaaagaagcggtgaagcagcgtctgaaccgtgacgatcagggtatctctttcacggagttctcttataacctgctacaggggtacgacttcgcttgcctgaataaactgcacggcgttgccttacagattggcggttctgaccagtgggggaacatcacttccggtatcgacctgacccgtcgtctgcaccagaatcaggtatttggtttgaccgttccactcatcaccaaagctgacggcacgaaattcggtaaaaccgaaggcggcgctgtctggctggatccgaagaaaaccagtccgtacaaattctaccagttctggattaacaccgcagatgccgatgtttatcgcttcctgaaattcttcacttttatggacattgaagagatcaatgccctggaagaagaagataaaaacagcggtaaagcgccgcgcgcgcagtatgtgctggccgagcaggtgacgcgcctcgttcatggtgaagagggactggtcgcggcgaaacggatcaccgaatgcctgttcagcggttcactgagcgcgctgagcgaagctgactttgagcagttggcgcaggacggcgtaccgatggttgaaatggaaaaaggcgccgacctgatgcaggcgctggtagacgccgaactccagccgtcacgtggtcaggcgcgtaagactatcgcctccaacgctgtcactatcaatggtgaaaaacaatccgatcctgaatacatctttaacgatgaggaccgtctgtttggccgctataccttattacgtcgcggcaaaaagaactattgtctgatttgctggaaataaggcattaagtaacagggagtgagaaatcactcccttatttttgatgttcaggtaaaaaaatgaagaatatcctcgctatccagtcccatgttgttttcggacatgcgggcaacagcgccgccgaatttcccatgcgccgtcttggcgcgaatgtttggccgctgaataccgttcagttttctaaccacacgcaatatggtaaatggaccggctgtgtcatgccgcccagccatctgactgagattgtccaggggattgcggacattggccagttagcgcactgcgacgccgtacttagcggttacctgggatctgccgagcagggagaacacattctcggtattgtgcgccaggttaaagcagcaaatccgcaggcaaaatatttctgcgatcccgtgatggggcatccggaaaagggttgtatcgtggcgcctggcgtcgcagagttccatgtgcgttatgcgctacccgccagcgatattatcgcgcctaacctgattgaactggaaattctcagcaaacatagcgtgaataatgtggatgacgccgtgcaggcggcgcgtgaactgattgctcaggggccagaaattgtactggtaaaacatctcgcccgcgccggttacagttcagaacgctttgaaatgctgctggtgacagcgcaggaagcctggcatattagccgtccgctggtggatttcggttcacgtcagccggttggcgttggcgatgtcaccagtggtttattgctggtcaaacttttgcagggcgcgacgttgcagcaggcgctggagcacgttacggcggcagtctatgagattatgatcgccaccaaaacgatgcaggagtacgaactgcaggtcgtggcggcccaggacaggatcgctaaccctgaacattacttcagcgcaacgcggctgtaattattgctgctaaaaagaggccggatggcggtacagcgagctatccggcaacatgacattaattcagtccttccgctttaagcgctgccgcaacggtcggtctttttgcgacacgctgcatataactttcaatatgcgttaacccgtccatattcagttttacgccataggcccaacgcaatacggtaaacagataagcgtctgcaatggtaaaacgctggccgcaaatccactggtcgtctgaaagcgactcatccacatactgcaatttcttttccagaccggcgcgaacggcgggtttgagtgtttccggcgtgtcagggcggaacagcggggtaaagcctttatgcagttccgttgcaatatagttgagccattccagcgtatgatagcgagcaagactacttaccggcgccagaagctggcggtcgggaacgctgtcggcgaggtactgcataatggcgacgccttcagtcaacagtgtgccgtcatccagcagcagagccggaacctgtcctttagggttgactgccaggtaatcatcaccgttttccaggcgtttttttgcgagatcgacgccatcaagcgtaaagtctttgccaatttcgcgcagggtaatatgggaagcaagagagcaggcacccggtttgtagaacagtttcatcggtaactcctttttgctgaggtttaaagtatggtagtgcggggacgagcaaaaaaaaagccgctaacgcacagttagcggcctgaatgttgtttcccggaaaattaaactgtagcggctttagagcctttttcagcggtatcatcgtcctgggtcatacggttcagcttaggcgctgtcagcagcatcaggacggcgataacggcggttgctatgccaatctgcataaatacgcgaccatagacttccagggacatcagtgggtcagtcacgtcgctcggcacagccatcaggttggcgacataaccgccgatgatgttagcgcctgccgttgtcaggaaccagctacccatgatgaaacccatcagacgctgcggaaccaactgtgcgaccattgccagtcccagaccggagatcatcagctcaccgatactttgcaggccgtagcttgcgatcagccagtttacggatacgatgccggcatcgttcgcaaatttggcacccagcggcagaatcaggaacgcgccggaacacagcaccataccaatggcgaatttcatcggcatcggcagcgtatcgcccatcctgttatagatagcggccagaatcgggctgccgataatgatccagaatgggttcagcgcctgatactgttccggttcgaacgcgataccgagaatagagtgctcgacgttacgaatggcaaagaagttcagcgacgtcggcatctggctgtacagtacgaagaagataatcgcctgcagcatcaaaataaaggcgacgatcattttacggcgagccgcgccgtgcatggaaaacgcttctttaccgaagataatgacgatgccaagagcgattacgcccagcaccatacgtgcgatatcctggttgtgcagcagccaggtggcgaccgcaatcagaacgacaatacccacgatggtcagcagcagattacggaagttgatcggttcaaagtcgggtttggaaccgtagcttttcacccagcgctggcagaaagcaaagttaacgacggttatcagcataccgacgacgctaagcgcaaacgcggtgctccagccataacgcgccgccagccacggcgtcgccagcatagagaagaaggagccgatgttgacggacatataatacatcgtaaatgcgccgtcgagacgcggatcgtccttcgcgtaacaggtagacagcagggaagacgggttagctttaaacagaccgttacccacagcgatagccgccatgcccatatagacgatgccagcgtcatgaccagaccatgcgaccagcgcataaccgatagccagcaccacggcacccagcataataacgcgtttggtgcccagaattttatcacctaaccaaccgccaatggcgaccaggccgtacaccagtgcactgaaggaagagaaaagggtgatggaatccgcttctgacatacccagttgttttaccaggtagacggccataatgccttgcaggccgtaataaccaaaacgctcccataactctatcgagaagatgagatagaacgccttcggttgtttgaaagcgttcaaactgacgctttcagttggttttttgtttgcagtagacacttttacctcttttttacgccccgtattaacagggattgtctggcgcgtgatgagtcagactcatccgtccgattgttatattggaggggaaacggcaggtaatgttcactatctttcctctccagacaagagctttgtaataatctgttacatataactcttctggttgaatcgtccgatgtcagaaatgttatccagcgttaaatttcttcatttgaagaatggcagatttttacactgcaaaaaggccattagtttgggtgaaaggcgatatcttctgctatttaaggtgaaaagcagtgatataggccattatctgaaaaaatggcagagtaatgttttgtagtgaaaacggggcgtcagtctatccggttgtaaatgtaaccttagatgtcattaaatttcacatgaagttatcaaagtgatcctgatcacggatagatagaattttttgcgattaaaaaaatgattaacctgacgtggagtgaaaacgaaagcacattacatcagaaaaaggacagagactggaatgattgatggctaaaatagatccaggccgaaggtgggagcgcgctggcgtgacggacgcactccgaccatatcaaatatcgactttttctttgtattcgcaaagatcttcaatgaggcaggagccgcagcggggttttcgggcgatacaggtatagcggccatgcaaaattaaccagtgatggcagtccactttgaactcattcggcaccactttcagcaacttctcttctacctgctcgacatttttacccggcgcgaactgcgttcggttgcatacacgaaatatatgcgtatcaacggcgatggtcggccagccgaaggcggtatttagcaccacgttagcggttttacgccccacgccgggaagcgcttccagcgccgcccgatcctccggcacttcgccattatgcttgtccagtaaaatacggcaggtcttaatcacgttttccgctttactgttaaataagccgatagttttgatataggatttcacgccctctacgcccagctccagcatcgcggctggcgtattggcgaccgggtaaagtttggcggtagccttgttcacgctgacgtcggttgcctgcgcggaaagcaacacggcaatcagcaactcaaacggcgacgtgaaattgagttccgttgtggggtgcggattgttgtcgcgcaggcgcgtcagaatttccagcctttttgctttgttcatcagactttccctgtttcacctgccggaacagcggaaggcgcggtttcggcgcggcgtttcttcattttttcatcaataagatattttaccgccagcatgagccccaggccgataaacgcgcctggcggcagcatcgccagcaggaaaggcgagtcggtgtgaaatatctcgacccgtaatacttttgcccagcctcccagcaggctatccgcgccatcgaaaagcgtaccattcccgaggatctcgcgcagcgaacccagcacgaacatcgcgcctgtcgcgcccatgccgatggaaaaaccgtccaacgcggaaagccacggtccttttttcgcggcaaacgcttcggcgcgaccaacaacaatgcagttcgttacaatcagaggaataaaaatccctaaagactgatacaaaccgaacgcatacgcattgatcagcatctgtactgcgcttaccaccgaggcaatgatcatgacgtaaatcgggatacggatttctgccggcgtccagcgacgtagtgcggacaccgtaaggttggtcagcgttaataccagcgttgtggccagacccagccccagagcgttggttgccgtagacgtcaccgccagtagagggcacaggccaagtagctgcaccagagcagagttatttttccataacccctgaacaacaatgtcttttatttcgctcatggctattctccacaggcggttaaatgggggagctgagcgggcagtgattcggcgtacagccccgcgcgtttaaccgcattcactacggcgcgcggcgttattgtcgccccggtaaattgatcaaaatcaccgccatcttttttcaccgcccagtgcgtatcattttcaccactgatggttttaccgctaaagtgggtaatccagtcagacaaacggcgctcaattttatcacctaaccctggcgtctcatgatgttccgtcacacgcgtccccaggacggtaccgttgaaatctgcgccaacaataagctggatagcgccggaatagccatctggcgcggtagcctcaatgatggccgctacgggtttatcatccttgcgagcgataaaaacacggtgtgtgcctttgccgagggcgggcgcatcgaccagataacaactctcttgcagattattattgtaacgatctggcggcaatacctgatcgaacagggcatgttgttgttgcagcgcttgttcgtggatggttgattttgtcatctgattaatcaccgcggtcaatcccgtagagcctgcggcaaaaagcgccagcgtaataccgtgtttacgaatcgttttcagcatggtttatcctttgcgatgtccatagacgcgggggcgcgtgtagtagtcgatcagaggaaccgtgatattcgccaacaggacagcaaaagcaacgccgtccggatagccgccgaagctacgaatcagccacactaataccccagccagcgcgccgaaaattaaacgtccacggttggtcgtggaggcggtaaccggatccgttaagataaaaaatgcacccagcatggtggcgcctgacagcagatgaagctgcggcgaggccagcgtagcgggcgagaaaagccagcctaacgcggcgcatagcgccagcgtcagcagaaaactgaccgggatatgccagcggatggctttttgccacagcaggaatacgccgccgacaagccaggcgaggttaacccactgccagcccacgccagccagcgcgccgctgtatatcgggtactgcatgatttgctcaacggagtgcccggcgcgcaaggacgttttaaacgtatccagcggcgtcgcctggctgataccgtcaataccgatacgtagcagcgtcatatcgccgccgctggcggtatgcccggtaaaaatcatccgcaacgtgtccagcatatcgggcgttgttgcggctatttcataaggcggcaaccagcttgtcatttgcaccggaaaggaaattaatagcaccacgtaaccgatcatggccggattaaaggggttttgtcccagcccgccatataactgtttagcgataataatggcgaatccggttcccagcacgaccatccaccagggcgcaagcggagggatgctgaccgccagcaaaagccccgtcaataacgcggaataatcctgcaggtgactggcgaccgattgtttgcgcagcctgaggacaatggcttctgcgacgagcgccgtgatagcagccagaacgatctggaaaagcgttccccaaccaaaaaaccacgtctgcgcggcaatccccggcagagcggcgattaataccagcaacatgattcgcgatgtctggcgctggttatgggtataaggcgagcttgcgattctgaataccatttaatcctcgttaacaacctgctgctgtgctgctttttttgcctgaacgcgggcgatagccgcagcaaccgcggctttacgcgggtcggccggttcggcaggttcgcttccggcctgctgctcctgcttacgggctttggcgcgagcgatggccgcttccactgcggctttgcgcggatcgatcggttcggcaggttcgcttccggtctgctgctcctgcttgcgggctttggcgcgggcgatagccgcttccaccgcggctttgcgcggatcgaccgcttcggcaggttcgcttccggtctgctgctcctgcttacgggctttggcgcgggcgatagccgcttccaccgcggctttacgcggatcgaccgcttcgaccggttcgcttccggcctgctgctcctgcttacgggctttggcgcgggcgatggctgcctccaccgcggctttacgcggatcgaccggttcggcaggttcgcttccggcctgctgctcctgcttacgggctttggcgcgggcgatggctgcctccactgcagctttactcgggtcgtcgccgggtatcgcgctgtcagccatcggatgagcggcttgtttagcgcgcgcttgcgctttacgcgcttcacgggccgcgatgacggcgctattgtctggctgactacccgcctgaataaccaccggttgcgtggcctgcgcctgtttctcttttacccgcgccagcgcagcggcaatggcatcctgatcttttgccgctggttgtaccgctgcgctcttgtgacgtgcaaggcgggcggctttttcgcgctccagtcttgcctgacgagcctcaaaacgcgctttggcttcggcggcgcgtttttcttcaagcctgatcgcattaatctccgctttttcctgacggaaatattggacgagcggaatattactcgggcagacccaggcgcaggcgccgcattctatacaatcagcaatatggtgagcggtagccttgtcatgctgctgccctttgctgaaccaataaagctgctgcggtaaaaggtcggcagggcaagcgtcagcgcaagcgctgcaacgaatacagcttttctcttcctgaggcgctcccatttcagtcacggatggcgccagcaggcagttggtgatttttacgaccggtacgtcaagccagggaagggtgaatcccatcaacgggccgcccatgatgaccatctggtcagcagaagggcagaacccggcatcgttaagcaaatgacgaacgggagtgccgagccgcgcccagacgttacccgggcggcttaccgcttcacccgttaaggtgacgacgcgttctgtgatcggttcgccgtcaatcacggcgcgtttaacggcatacgccgtaccgacgttttgcatcagcacgccaatatcagaggagcgcccgccgtggggaacctgttttcccgtcagtattcgggtgagctgttttgcgccgccggaagggtatttggttgggatcacacgtaacgaaatatcgtgggcgtcagccagtacggcgcgcagcatggaaatagcctgcggtttgttatcttcaatgccgattaatacctcacgcggttgcagaatatgcgccaggatgcgaataccttccacaatctgcgcggcgcagtcctgcatcaaacgatcgtccgccgtaatgtaaggttcgcactctgcggcattgataataagcgtggtgattttatcgccgccgccctgcaatttaacgccggtgggaaaccccgcgccgccaagcccggcaacgccatactgatgaatgcgttcaatgagcgcttcacggctgtgggcgcggtaatcagaccagccctcgcgttcaatccagcggtcctcgccgtcggcatcaatgattacgcttaactccgccagcgccgaaggatgcgccgtcgagtggggggcaatagcgataaccgtcccggaggtgggcgcgtgtaccggcagcattctcccacgtccacgggtaagcgcctggccgcgtagcacgcgatcgccgacgctaacgcacagctcgccctcagcgccaatgtgctgttttaaagggataacaaagcgcggcgctaaaggcacctggcgcagcggcgtgccgtttgactgggtcttcatttcgggcggatgaataccaccgtcgaaatcccagattttatcttttctgaaagcggaaaatagtttaagcatgttgttccacgggaatgatgcgaacgggaatggtgttcaaatcccatttccaactgtcgggcgtctcattcaccggacgtaattcgatgcagtgcgtcggacacggatcgacgcacagattacagccagtacagagatcgctcatgaccgtgtgcatggcgcgcgttgcgccaacaatggcgtcaaccgggcaggcctgaatgcattttgtgcagccaatgcagttattttcatcaataactgccagcatacgtactggcgcagcctgctgttcttcaccatcgcatggttgcggctctacgtttagcaactctgcaattttcagcatgacggcttcgccgccgggcgcgcaacgattgattttctcgccctggagacccacggcttcggcgtaggggcggcagccgggatagccgcactgaccacactggctctgcggcaaaatcgcatcgattttttcaacaaccggatcatcttcaaccgcgaatcggcgggaggcataacccagaatggcgccgaacaccagacccagaagggtcagggcgccaacggcaatccagatagtattcattacaacttcaccaaaccactaaaacccataaaggccaaagacattaatcctgcggtaatcaatgctatcgcgttaccacgaaaaggggcgggcacatccgccacggcaaggcgttcgcggatagcggcaaacagaaccatcactaatgaaaaaccgacggcggcggaaaatccgtacagcgccgactgaagaaagtgatgaccgagattaatattcagtaacgctacgcccagaaccgcacagttagtggtaatcagtggtaagaagatgcctaacaagcggtataacgccgggctggttttccgcacaaccatttcggtaaattgcacgaccacagcaatgacgaggataaaggctagcgtccgcagataaatcagatccagcggaataagtatccaggtgtcgataagccaggcgcatatcgacgccagcgtcatgacaaaggtcgtcgcgaggcccatccccatggcggtttccagttttttggatacgcccataaagggacaaaggcccaggaatttgaccagtacaaagttattgaccagtacagttccgacaaagagcagcaggtaatcagtcatgtttcggcctgaaataaaaaagccgcctattatctgtcaaactaccacaggcgacaacaggttaactgtagggttattacggattaacaaacgttgttttaacgcgcgctgaacgtttgagataaggcacaatgagcgccgttgccaacagtgggaagagtaactgacgcacggcaaaggcatctgagacgggcgaaaaggcaaatgctttaaccgccagtaacaccgacaccagcagccagataatgtaatgcttcggcacgcagcgtctgcgcttgaagaatgcgatcgtcaaccacagggtatagtaccacatggcgatagcggtaataaatgaaatgccccatagcagtaaattaccggtttcctgtccgctaagcgtcttgaacgtttgcggtgtggcaagcgccataacgtagagtaataacgccagcgaggcgctcaacaacgcgactaacagccaggctaacgggccaagaagccagcctccaattcgttgtggcggtgttgtagtcatatcttctccggggttacgcgcattaacggtcatgccgctcattttggggcaaatattataaggtttttgatgttaaacgctactttctttattgcacatagcgccagacggattgcggaacctgacctacatcaaacaggcgtcctccggaaaccagttcggcacggcggtgatctgcagcgcgatacatattaacaatgtccatgtcatcagtaagggtatagttaaggtggtcgaacagtttttccagactttcgagcgaactaattttgcggaattttaatagataatcctgaacagtcatataaagttgatccatattaaatataatgccaacggagtagtcactgataaaaaataaacaaaaccgcaccagtgagaggtcaggggtgcaggtaaaaagggaatattcttaccggtaaagagtcaggcgccacatggcgcctggggcgaaaggttaacgcgctttcctacaacaggcaataaacgtcagaccagataggacatatttcgttttttttgccggtttttgacttttctttgcaccccccggggcgccgcttaccgtaccacgcgaaaatgcctttacattatctgacgcttacttcttctggacggaagccgtgggctctggtggttggtaattgtcaatatggttggcaatacctaaaagaatgactgagataacgagaactatccacccagttaattcaataagacgattcattattgacgacatttgctttgatttatccataaacacagggggtaaatgttactttcctggcgaacggtcggcaagagggagggaaacgttttcagcctctgttctgtaacaagttaatcatttgatgctacgttgatggtcaggacgctattgcggctaatcgcacgatggtgtggaatagcgatatctaaaaccggaggcagtgagatgaatgataaaatccgcgttgggttaatcggttatggctacgccagtaaaacctttcatgcgcccttaattatgggaacgccagggctagagcttgcggcggtatccagcagcgatgaaacaaaagtgaaagcagattggccggcggtttccgtggtctctgagccccgacatttatttaacgatccgcatatcgaccttatcgtgatcccgacgcccaacgatacccatttcccgctggcgaaagctgcgctggaagccggtaagcatgtggtggttgataaaccctttaccgtgacactgtcacaggcgcgagaattggatgcgcttgcgcggagcactggtcgggtactttccgtcttccacaaccgacgctgggacagcgattttttgacgctgaaggccttgctggcggatggcgtgctcggcgaggtgtccttgtttgaatcccactttgatcgcttccgtccccaggtgcgcgaccgctggcgcgagcaaggcgggccgggaagtggtatctggtacgatctggcgccgcacttgttggatcaggccattcaactttttggcctgccggtcagcatgacggtggatttagcgcaactgcgtccgggcgcgcaatctacagattatttccacgcgattttatcctacccccagcgccgcgtgattttgcacggtacgatgctggccgcggcggaatccgcgcgatacatcgttcatggttcgcgcggtagctatgtaaaatatggcctcgatccccaggaagaacggttaaaaaacggcgagcgtttaccgcaggaagactggggatacgacatgcgtgacggcgtattgaccctggttgagggagagacgcgcaaagaagaaaactggcttacgttgccgggtaactatccggcatattatgccgccatccgcgatgcgttaaacggtaacggtgaaaatcccgtgccagcaagccaggcgattcaaattatggagttgattgaactgggcatggaatcggcaaaacatcgcgcgacgctgtgtcttgcctgagatgtcgcatttctccgcctgggatagcattaaaccgcaggcggagagagggcgttagcatcaataaagcaatcttacgcctcggccactttttcgcgcagcgcacgtttttcgctatcgctcagaaaggcgatttccagaccgttaatctgcgcctggcgaatctgttcgcggctcaatcctgccgctggcgcggcgacgtgatattcatggataatatctacgccctgaacagccggatcgtccgtattaagactggcgagaacgccatgctcaaggaaggttttgagtggatgatccgccagcgatgcgacggtactggtctgaatattcgaggtcagacaggattcaataccgatacgctgctgtgcaagaaaatccattaacgcgcgatcttcgacagcttttacgccatgtccgatacgttcggcccccagttcgcgaatcgcctgccagatactttccggccctgcggcttcgccagcgtgaacggtgatatgccagcccgcatcgcgcgcccgattaaagtgcgacaaaaacagactgccgggaaagcccagctcatcaccggctaaatccagcgcggtgatgttctctctgtgcgccagcagcgcatcaagctcctgtaaacatgccgcctcgccgaaggtacggctcataatgccaatgagtcgtgcctcgacgccaaacgtgttacagccgtcgcgtacgccgtcgataacggcttcaaccacgcctgcgattggtaactgatgcgccatcgccatatagccgggcgaaaagcgaagctcgacgtaatgcaggccgttacgtgccgcatcttcaatattttcaaaggccacacggcggcaggcgtcaagcgatgccaggacttttaccccccaatcgagtttagtgagaaagcttactaaatcgggttcggttgaggtgacctggacatgcggaatcagcgtttccagcgtttgggcgggaagggcgatgttgaactgccgaccaagatccagaattgtttgggcgcgaatgttgccatcaaggtggcggtggatgtcagtcaaaggaagcgtaatatcaatcatgggcgcactcaatttttaataaaagtgcgcaccattatactacagattgataatgctctggaaattttgcaaaaacggagtcattacgttgcaacttcgcgagagcgcgggagaaattttgtatcattctctttaacgcgcccccggtcagctcacgggggcgtctctgttatcgcctctcaggataaagggtcaaccccccgcctgtagacagtatcagcgaacggtgcggtggcaaaatccatatccgagatcgtaaaggggagcagatcggcttcgccaaaacgatcggcgacataatcccactacgtacaccatgtcccgcgtcggtcaacttcctgtgaaaaatcgaacatatcccttccttatgcctgaacggtattcatcaggccaaccatttcatcttttaccgactgaacctgcgggccgataattacctgcaaattatgctgattgagctgtacgatgcctgtcgcgtgattgtccttcaatgcctggacatcgacaaacgacatatctttcactgacaggcgtaggggggatgcagttgtccagactcacgatgttttccgtgccgcctaatgctcacgacgagcaccatgtgcggagtcaaacgatagccgctcgcctggtaacgcaaaagtagaggctgcgcgtcgttcggcgcagaccgggtgcagcgtcgcgacacccggcaaggcgattattgttgaggcagcgccggaacgtccggaacggaaagcgccggcatcccaaacaggccgacaaagtcttccaacggcattttttgtccgttgagcgtgatctggccattggcgtactgcaaactggaggcgatagtattatccttcagcgttgtcagtcggaacatctgacccattgcggacagcccctgcacctgctgttttgccagtttttccgcatcatcctgctgatagccttccagttttgctatctgcgtcataaactcgaccgccatgtccattggaattgccagtttcgcatccagcgatttcacggagcggtcgacttcctgcgccagcgtttgtggttgtgccgttgtggttgccggatctttgaggaacagcgacagattcagcgtggtttcccctttggcgtttttccagctaagcggcgccagagtcagtaccggatcgccttttaacagcacggggagagcgctaaagaacgcttcggtgactttttgctgataaagctcaggattctgcgccacgtccggctgattcagcagcgcctgcgtttgcgcatgatattgctgactaaactggtgccaggcttcgccgtcgatttggccgactttcagcgttaatttaccgctgcccaaatcctgattctgcactttcaggctgttaagcgagtaatccaactggctgttaatggtttttccgtcgttgacgagatcggacttgccggtaatttccatcccttccagcaccgccatctctttaccctcaatggcgatggacagtttatccagcgttaacttttggtcgcccacacgttcgccaaagcttgccagtttactggtaccgtcggttttcaaattattaaaggtgagttggaccttctgattatattcgttaacggcatcgaccaggccgctctgcgcttcgcctgacagcgaaaccacattaccgtctttatcggcgttaagctggaactcgccgccgctaaaggcgaccttttcaccggcattctcgtagtttaacggcttgagagagatatcggagcgggtatcgccgccataaccaatgcgggtattgataacaaagggcgcgtcgcctttcgcaatatcaaagaggggttttgccgcatcgttattcaccagagtggtttttaccgacgccatagaagggatcagattgagcgttttgagctgggcgagcgggaaggggccatgtgaaacggactcgtccagcacaatgctttgcccgggcttcaaccaggtattgtctgcgccggcaaccggtttgacaaccagttgcagatggctactgaacacgccgcgctggtagttttgataacttaattcgacaccggcctccggcgcagtacgcttgagctgttcattggcctgagtcaccatttctgcaagatggttctccagctttttccccgtataccaggcgccgcctgtccagacgatgccaagtgcaattactacacctgcagctaccagtgtttttttcatatcaattgtccataaaaatgaaaccaggcggattaaaccgcctggaggagttttacgtctgttataagcttagcaagagttgttaaaaaattcagtacgttgctacagcttgttataaacacgcgctaaacggcccgtgccgctggcgttaaccggagactcatccgcgccgataaaggcagattcacccggcttcagtaccagacgctgttcatctttacgtaacaccgcctcaccctcaacgcagaacagaatcgcggcgctgtgttggccgatgctcgtctcctgaagcgccaggtcgtgcagtgaaaaagcaaaatcgtcaaccggaattgggaagtccagctccgcgccgcttttcaccggggcagtcagcaactcgccggcaggcttaggttcgaacttcacgttcgcgaccagctcagggatgtcgatatattttggcgtaaggccagcgcgcagaacgttatcggagttcgccatgacttccagcgcaacgccctgcagataagcatgaggcgtttcagcaaacaggaacatcgcctcgccgggattcagtttgaccacattcagcaacaaaggagagaaaagcccgctgtcgtcaggataatactctgaaatcacgcggatcgtttgccacggttcgccttgctggctgttaagcgccgctttgagtacggctaacgcgcgggatttttcttcgccttgcatattcaacaggctggcgaaaagctggctcagacgttcagcattcggcacctgcaaaaagtgggcgatagcggaatgcgcgccggcgacaggttgcagtaaagagacaatgtcagaaaattcgcggaacgcgttcatcgccaggaaaggcgtcagggcaaaaaccagctctggtttatggttaggatctttatagttccgctctgcggcatccatggggatacccgccgcattttctttcgcgaaaccgatttcggagttgcgtttattcgggtgcacctgaatagagagcggttgtgcggcgcacagtactttaaacagaaacggcagttcgccgaaacggttggctaccgcttcgcccagcatggcggttttattcttttcgatggcgtcacgcagggagacggtttcgccgttggcggtggtgattcgcgagctgcttttgggatgcgcgcccatccagagttcagccattggctgctgctgcggattggcgatgccataaagttccgttaacgcagttttacttccccaggcatagttttgcactgagttaatgagtttttgcattatcaagccctgtttcaatgtggagatcaatgggaggtattaaaccaagaaacccgcatgaagtaacctccgggcgtaaaaagtcgtacttgtctcagtttttgttaaaaaattgtgtaggatagtgttactcgctttgagtcgggcaatggaacacctgcccagagaataaccataccgagcggtaagtgagagcacaatgtcaaacaaacccttcttttatcaagacccttttcccctcaaaaaggacgataccgagtactacttgttgaccagcgaacatgtttccgtcgccgaattcgaaggacaagagatcctgaaagtcgcgccggaagcgctaacgctgttggcgcgtcaggccttccacgatgcgtcttttatgctacgtcccgcgcatcagcagcaggtggcggatattctgcgcgatccgcaggccagtgaaaacgacaaatatgtcgcgctgcaattcctgcgaaactccgatatcgcggccaagggcgtgttgcccacctgccaggataccggtacggccattattgtcggcaaaaaaggtcaacgcgtctggactggtggaggtgatgaagcggcgctggctcgcggcgtatataacacctatatcgaagataacctgcgctattcacagaacgcggcgctggatatgtacaaagaggtcaataccggtactaacctgccggcgcagatcgatctctacagcgtcgatggcgatgaatataaattcctctgtatcgctaaaggcggcggatcggcgaataaaacctacctctatcaggagacaaaagcgcttctgacgccgggtaagcttaaaaattatctcgtcgataagatgcgtacgctgggcaccgccgcttgtccgccgtatcacatcgcgtttgtcattggcggcacctcggcggaagcgaacctgaagaccgttaagctggcctcggcaaaatactatgatgcgctaccaaccgaaggcaatgaacacgggcaggccttccgcgatattgagctggaaaaagaattgttgcttgaggcgcaaaatcttggcttaggcgcgcagttcggcggcaagtatttcgctcacgatattcgtgtcatccgattgccgcgccacggggcatcgtgtccggtaggtatgggcgtgtcctgctccgcggatcgaaacattaaagcgaagatcaaccgggacgggatctggatcgagaagctggagcgcaatcccggtaaatatattccagaggcgctgcgccaggcgggagagggtgaggcggtgcgcgttgatcttaaccgtcccatgagcgagatactgcaacaactgtcgcagtatccggtatcaacgcgcctgtcgctgaacggcacgattattgtgggccgcgacatcgcgcacgctaaactgaaagaacggatggacagaggcgaaggtttgccgcagtacatcaaagatcatcctatctattatgcggggccggcaaaaacgccggaagggtatgcctccgggtcgcttgggccgactaccgcaggacgaatggactcttatgttgatcagctccagtcgcagggcggcagtatgatcatgctggcgaaaggcaaccgcagccagcaggtgaccgatgcctgtaagaaacatggcggcttctacctgggcagtatcggcggcccggcagccgttctggcgcagggtagtatcaagcgcctggagtgcgtggaatatcctgaactgggtatggaggctatctggaaaattgaagtggaggattttccggccttcattctggtggatgataaaggcaacgatttcttccagcagattcagtcatcgcagtgcgcgcgctgcgttaagtaatgtcgccgccctgcggggcggtaacatgattcgctattttgccggagaacggcgcaagcgccttatccggtctacaccgttgtgttgttatcgttaatactcataagaccgcaaacatgtgagcaatgtcgacacatgatctcatcaacttgagtaaggagcaggtaatggtaacggtacgccgcgagaaagattcaatgggcgcgattgaagtcccggcagataaactgtggggggcgcagactcaacgttcgctggagcattttcggatttccacggagaaaatgcccgtctcgctcattcacgctctggcgttgaccaagcgcgccgctgcgaaggtcaaccaggacttagggttgttggcggcggaaaaagccagcgcgattatccaggcggctgatgaagtgctggcgggaaaacatgctgatgagtttccgctggcgatttggcagaccgggtccggtacgcaaagcaacatgaatatgaatgaagtgttagcgaaccgcgccagtgaaattttgggcggcgttcgcggtatggaacgcaaggtgcatcccaatgatgacgtcaataagagtcaaagctcaaacgatgttttcccaaccgccatgcacgtggcggcgttactggcgttacgcgaacaccttatcccgcaattatccgcattaacggatacgcttcgcgataaatcccacgctttcgccgatattgtcaaaattggccgtactcacctgcaggacgcgacgccgctcaccttaggccaggagatttccggttgggtagccatgctggaacataacctcagacacattgagcacagtttaccgcacgtcgcggaactggcgctcggcggaaccgcagtagggacagggcttaatacccatccggaatatgcccggcgcgtggccgaggaactggcgacgattaccgcggcgccgtttgttaccgcccccaataaattcgaagcgctggcgacctgtgacgcgttggtacaggcgcatggcgcattaaaaggactggcggcctcgctgatgaaaatcgccaacgatgttcgctggctggcgtccggcccgcgttgcggcattggcgagattgctatcccggagaatgagccaggcagttccattatgcctggtaaagtgaacccgacccagtgtgaagcggtaacgatgctatgttgccaggtgatgggtaacgatgtggccatcaatatggggggcgcatcgggcaactttgagctcaacgtctatcgtccgatggttattcataattttctgcaaacggtgcgcctgctggccgatggcatggagagttttaataaacactgtgcgtcaggaatcgagccaaaccgcgagcgtattacgcagttgctgaatgagtcgctgatgctggtcactgcgctgaatacgcacatcggttacgataaagcggcggagattgcgaagaaggcgcataaagaagggctgacgctcaaagcctcagccgtggcattaggataccttagcgacgaggagttcgacgcctgggtacgtccggagttgatggttggcagtatgacgccgggacgttaatccgccacatacaggtgcagtcgcggaataatcagtcgcagcggctgcgcctgtggtttaaaacggtgctgaatattgtcggcgtcatagttttccagcccgccaatatccggcacgccagcgccgttgtccgtgttgattaatgcgataatcggcgtggggcaggcgtgttgcacctgtttctgctggcctttataccagatgcgggagatcggctgtactttaaccggacgcttaatcttgagtcgggcctgctgcggtaaggcagcgatatcctgatattcccgttccagcttgaattgccattgttcgcgcgtccacggcgggacgctgcgcggcgacgcgaggctttttttcaactggctcagaacctcatcccggcttaaatttttaataatatgtttatttgcccagccgaaacgtatggtggcggggttattgataagcgtcagcgtgcggtaagcgttcagcgtaattaagccgggtagatgccgatgcacccactcaaaacgtgccgctgagggaagaccggactctaccgtaaccatctgctcgaaggtggttttcaactggttaatgcgctgtatctgattttccagatctaactgtgtcgcattatccacttgatagcataagacgccaggcaggcggacggcggctttactgctgcggttttcggactgctgttgaataaacaaatggcgatagtgacgtagcgccagcgcttcggcctctttccccagatgttgcgttacctcgatagtatccagcggcgcatgttccgcctctttggtcacctgcggcagtgaaaagacacgggcgataagtagcgaatgctgctgtagattatccgtcagcgccgccaggtgttgttctatctggcgaaaagtgccattcaggcgttcaacgagatcgtagcgggacatggtatcactcactttagttacaacatactatatgtatagcacagttcccgccgctcaaccagcgtgcaaaatgcgtcaggcagcggtcatgtcgggcatcgcgtgccagaccggccagcgaaagctaaattttgcgccgcccagttcgctctcgtcacagacgacgctaccgcccatcgccagggcgatagagtgtacgatggcgagtccaagcccgcagccgcctgtcgcccggtctctactggggtcgagtctgacaaaaggttcaaatacgcgctctcgcgcatccgcttcaatgccggggccatcatcttcgactatcaacgttgcctgactgccgtcgagtaacagactgacctgaacggtggtatgactgtagcgcaacgcattattcagcaggttatccagcactcgcgacattaaccgcatatcaagcgcgccataatcgccgattacacatgtgacaaggtttacggcacgttccggggtcacgctctgcacatcctgcaaatgcgcgagcaaccaggcggggaggtcgggttcggtcaacatcagttcattttgtggtcggtcaaggcgcgcataggtgagcagttcttcaatcagcgcttccagttgaccaatatcgcgattgagcgcctgtgattccggcggtgtcagattttcactcatttcaagccgatagcgtaaacgtaccagcggcgtgcgaagctcatgggcgataccgtcaatcagctgttttttactggcgatcagggcattaatgttatccgccatctggttgaacgcgacgcccagacgttcgaaactggagccattatcgaagtgcaggcgttcagtcaaatgaccctcgccaaagcgctgcgcggcggattcgagcctgagcatttcttgccagtgcgggcgcatccagataaacacaggaaaggcgagagaaaaggcaatgagcgccattaaggcgatatccagcagtcgcatttgatgcaggaaatagagatagggaaccgggccaaccgccaggacgtaatggctgcgcgggatacgctgaataaaggtgtattgatcgtcaagcgcgacaatatcgccttcacgcagtcgctgcgtggtggcggcatcaagcttatagtgatttaacggttcaacgcgtaaatcgaaagagaggttcaggtccatctcttttaacgttttcccccattcacgcggcggaatttcccgcagttcgctgcgcatcagatagagcgaacttttcatcagatcgtcgagcgattgcctgcccgcgcgttcggcggtgaatttgtacaccagtccgaccaataaggtcatgaccagaaaacagacgaacagcaaaaggtaaaactgcacaaacagctttttcatcaacgcccaccggatctcaatacattagctctatcgcgcgctgacgaaaaagatttcccgtcagcgccgctggtgggttataaaagcaggctttgcgtcaactgacaacctcattgtccggcgttaaggtccggactttcgtgaacaatgcgtccatcgacaagcgtcaaaacagcgcgaatggtatcaattctgtcttccggcatcgtcataaatggctgattgagtaccgccagatcggcctgttttccgacgcgaagctggccccggtgttgttcggcaaaggcgagccaggcggcatgacgtgtatataacgctagcgcttccagacgcgtgagccgctcgctggcgggtttacgcacggaaccgcctgacgctataccggtgatatgatattcgatagcgtgccagacaccggcaatgccaatacgcgtcgaatcggtaccgccagctacgacaagccctttatccagcgccagtcgaaccggcggcgaattgtccgtcgcgccgggtggattggcgtcacggatggcaagcccctcaaagtaaggccccatttgcacagtgtatgccagacccagcttacgcattcgctcaagcgtctgtggcgaaccggtattcagatgcgcaatagaccaacggagagggcgcagatcgtactgctgagctacctgctcaaaaatcgtcaatatcgcgtcggcgctatcatcggtataggcgtggatctcaagcggtattccccgttttgccgcaaatgtcgcgacctggcgaagcgcggttttgtcctgctctgaggaagaaaaccctggggccatccgcacgccgtcattcattccggccaccaggctttcccccaggccaagaaaagccagttgcccgtcatcggcacgcgccgggcgaaaggccatcaggttgctgaaccactgcgcttcatgacctttcgcttctggctgtaccggaatgcgataccccacgcgcagcggtaaatccccctggtttcgcattgcaaataaaggctcataagcggcggcaggcccggcagaggggtcaatgatgccggtcacgccgcgagcgttcatatcagcgaaaaattgccgcagaccaccctcacgatcggcgttacgacttatgctggcaaaaagctggttaaacgcggcgatgtcaccaaataatttccccgtggcgctaccttttgcgtcgcgctctacgcggattcccgctaaatcaggaggaggggtgttgttaaggccaagtacgtctataccgcgctgattcactaacgcatagtcgtaaagatactgaatataagccggatgatcgggaagggcgtgactcagttcggctaccgtcggcgcccggttttctgcaaattgcgccggtatccacgatcccactacggctacccattgatcgtggggacgacggttagcgtcggcgcgtaatttatccagcgcgtctttaagcgaagggctgtcgtaccagtaggtttcgaatgtccaggtttgtccgccgcgaatggcgtggatgtgagtatcggtcaggccgggtatcacggttttaccctgtaaatcgatggtacgggtatggtcgccgcgccattcatttgtcgccgtatcatcgccaatcgccacaatccgcgagccggaaatcgccagcgcgctggcctgcggctgggcatcattcagagtgatgatattaccgttatgcaaaataatatccgctgccgggcgggcggcggtggctgcgcctgtggccgtgagcagaaagagaagcgcggttctggaaagcagagacgggacgagactgatcattagcatgttccttttgtcgggcgataagcaaaccatagagagcgaacaagaattgttcaatctgtgcccagggaactgtgcgttctgtttttagaacggtggtgatgaaaaaagaaaagcccgccgaaacggcgggcttgagaagaattaatgaataattagaactggtaaaccatacccagcgcgacgatatcatcagtgctgataccggcatctttatagaactggtcgtcatcatccagcaggttgattttataatcaacataggtggagaagtttttgttgaaatagtaggtagcacctacatcagcatatttaaccaggtctttatcatcgccattaacgttgttataggtcaaatctttacctttagacatcaggaaagaaaccgccgggcgcagaccgaaatcaaattgatattgggctgtaacttcgaagttttgcgttttgtttgctacgcatgagcgacaatcgtcattgccgtaaggcgtcatattacgggtttctgaatacattgtggccagatagatattattagcatcatatttagcgccaacagtccatgcatccgctttatcaccgccagcggtagagtaattaacctgaccattagtacgatcggaagtggtatatgccgcgccgaaacttacgcccatacccagatcataagttgatgagataccgaagccgtcaccgttagcgttcttcacgttacgatcgccgccgttattagtgccttcctgctcatgagaaacctggttttcattggcaccctgatattgcaacgcgaagttcagaccgtctaccagaccgaagaaatcagtgttacggtaggtggccacgccgttagcacgaccggtcatgaagttgtcagcgtaagtgtaggagtcgccgccgaactcaggcagcatatcggtccagccttctacgtcgtacaggacgccgtagttacgaccatagtcgaatgagccgtagtcgccgaatttcaggccggcgaatgccagacgagtccaggaattagcaccttcgccttcggtagtgttagcctgaacgttatattcccactggccgtaaccggtcagttggtcgttaatctgtgtttcgcctttaaagccgacacgcatataggtctgatcgccatctttagaagagtcatcagagaaatagtgcaggccgtctactttcccgtaaaggtccagtttgttgccgtctttgttataaatttcagcggcgtgtgctgcgccagcagccagcagagccgggatgacaagtgccaatacttttcttttcatttttttatccttaaaaacttaacttatttgcaaaagattgaacttctacagattcgttgaatcaaaggcatcctaatctgaataatattatttcagcaaatgctaacttttcttatatgttattaattaatacaaaagttactatcggaaacgcatatatttatggtgaatatatttgttattatgtattcatgtatgtgatttgttttatttcacaatttgcgaaaaaagatggcaatatagcggcgggcagacattctgttatcaattttgtgaactggcttcgagtttttttaatttaactttcttgagcgaaaaagacgtaatcatgaaccacaacgcagagaaaacggtaataaaggggccgtttcgactaataaaaatagcattcatgtatgcaatgtctgttttttgaacagtggcggtgatgagcatcgccactatgacttgataaaggcaggtaaaatctgtcggctaacttatcccgtcgtttcgtcccaggcatgaggggcaaaaagatagcctttattgcgaatggtctttatacgatagggctcagcagcgctatccagcagtttcttacgcaggcgggaaatcgctacatccacgctgcgatccagaccatcataattgacgccgcgcagcgtttttagcaacgcgtcgcgatccataatttgtccggcgtgtgtcgccagttcccagagcaattcaaaatcggcggtggagagcgatatgaaatcgccattgagctggaccgcccggttaaggggatcgatggttaacgcgccaaaacgcagcgctttatgcggcgtaagcgcgctctcctgaagactttttgcctgttgcgtttgttcgctttgccgcaggtgtaagcgcagacgcgccagcaaaacggccggaggcgtggttttgaggatgtagtcgcaggcgcccatctccagcgccagaatatgattcatatcactgtccagcgaggtgagcaggacaatcgggccttgccagcggtggcgtaaatcgcgacatatcgtcatgccatctttacctggaagcataatatccagtaaaaccagatcgggctgagtggtgaggataagatcctccgcccggtcaccacgcggctcaacaatgacatcaatatcatgtttcgccagataagcggcaatgagagaacccacttcagcgtcgtcttcaacaaatacaatgcggttcatattataaatggagaatagaaaacgccaacatacaccgcctctgttttcccttccataaatcttttctaaacgagagcggttccgttatgctacacgctgttgttattagcgtgttaaggcaaggtaatgggactcgtgattaaagctgccctgggggcgctggtcgtcgtattgattggtctgctgtcaaaaacgaaaaattattatatcgccggattaattcctctgtttccaacgtttgcgcttatcgcgcactatatcgtggccagcgagcggggcatcgacgcgatgcgtaccaccatcgcctttagcatgtggtcgatcattccttatttcatttatcttgcaacgctatggtatttcagcggcgtgatgcgcctgcccgtcgcgcttggcggtgcggtggtctgctgggggctaagcgcgtggctgctgattttttgctggattaaatggcattaatattggcaaagaccgtggtttccccatcgtaatacagacggatattacgatggggaggttgtcaacccaccagcatccacgtagccggaaccgccgcgaccagcaataaaccaatcagcacgacttcctgacgatttaacacgttgtcatgcttgtgcgtccgacgcgcatacaggaaaaccagtaatccaggcgcgtacagtacgacggacagcagcaggtgcatgggacccgacgcgtataacaaccataagccataaatacaggctccgataccgaccgcccgatggaggggacgtgttgcaatcttcagcagaaatgcgccgaccagaaagtagggcaccagaatcatttctgacgcaatcgtcaatagcgtgttgtagtccgaaccggtcagccagatcagcaccagacagatttgcacacagatattggtgagccataacgatgcagaaggcgcgccttgcgcattttgtcgcgcgaagatgcccgggaaggatttataggctgccgccagaaatggcacctccgccgccataatagtccagcttagataagccccgcagacagacacaatcagtcccgctgcaataataatttctccccacggccccatcatttttaccattagtccggccatcgacgggttacgcatctccgccagttccggacgcgcaagaacgccaagagaaagcagcgtgaccaggagatatattcccagcgccgcgaggaccgccagtagcgtggcgcggcctacatcgcgtttatttttcgctcgggccgagacgacgacggcgccttcaacgccaataaacacccacagcgtaataagcatggtgttcttgacctgttcccatacgggaataccgagttcaacaccagtgaagtccagtgtgaaggtatccagtttgaacatcatgatagccagcacaataaacgcgccgagcggcaacagtttcgccagagtcgcgaccagattgatgctggctgccgtttgtacgccgcgcaggatgaggaaatggacaatccagagcaagactgaagcgccgacaatagcctgccaggtattaccgtcaccaaacagacgcaaggcaggcgtatcggtaaagaaactcagcgctgaaaagacgataaccaaataggatacgttggcgatgaccgcgcacagccaatagccccaggcagaacaaaagccaatcagttcgccgaagccttcgcgggcgtaagtaaagataccgccgtcaagctcggagcgaatgcgcgtaaggattaacatggcgaatgccagtaagagtatccccacgccggtaatggcccagccaattaacaacgcagccggactggcaacggcggccatattctggggcagactgaaaacacctgcgccaagcattgagcttaaaaccagcgcggtcagcgcgctcagtcccagttttttttccattggtatccagctataaaaatgaaattggaagaataattattatggcaaaacgcataaaaatggtgaaagccactaaggcgcgggattttacggagagaagggaccgcatgcaacggcctggataagatttatcgccaaaaaagcgaaaagtgagattcatcgcgatatttgacggaactggcatcccgcgagaaagtgccggatggcggcttatcaggcctgccgttgaacgatcgtgtaggcctgataaggcaggtatgccgccatccggcgagaaagcctgatggcgacgcgcgccttatttatagaggtcggcgctgatggtgatgttattaccgcgctcctgccactgacgcgtaatatgataatacttagcgcctttcttcgccgcgcgtttggcgacctgataggagatttctgtcatattgccgtagttgccggtgaacttaacgctgtcgaaaggcaccatcatcgcagccgtcgctttattcagctcctcaacttttgtgccatccggaagtgtgacagtgtaacgtccgcctttggaggattgcgtttcgaagaaacggcctacttcggcgctcggcgaggctgacgtggcgacgcctggaatttcgactttcttcgcagcttcgccgccctgagccagcgcggcgcggccagcttcagagtctgccggaatagcgtccgggctctggacgatgcgttttttcgcatcttgtttatagataaatgcagtgatgcgctggtttccgccctgattcgcatctatctgacgaacaatatagaaagcgtatgcgcctttttgtttcgccgctttcgtaatggcatcgttaacttccggctggctacggtagaagccctgaacggtgacggtgtcatacggttctaattgtacggcctggtctttcggtaattccacgatgccattaatgacacgatttttgggcgcgtcggctttcggcgcgtcggctttatacacgtccgccacaacacgccagttaccactgttgccgaactccgaggtgtcgacaacatagaaggaggctgcgccttctttatctgcgcggcgggacacggcggagaccgcatcgccaatagcattaaaacgaccggtaataacgatgcggtcataaggttttagtgcagccgcttgctccggcgtcagttctgttgctgcatggacagaaaaagcagccgcagaaagcagagccgacgccaggagagtgttcttaagcttcataaaaataatccttcgccttgcgcaaaccaggtactggtattgttattgactagaaacgtggctgattattgcatttaaaccatatggatgtctgcgggatttttcacgcatcgtgtcatgtatcctatctttgatgataacatttgccgatatgtcgaaaaaaacggcgtccgggcggctaagctaatgaagcgcataaatttaataagttaatttaatgttaatttcttgatcgcgccaggggtttaatgatgttttgctgtcaaatttgagcgaattatcagccctcgcaggccattttcaaggcattatggctgcttagcggctgaatcgttcatgttttgcaaatttgataaaaaattctgttttttggcgctagatcacaggcgttattttcagtaggttatagagagtttgtaacggttttattctgctggggtaacatttacctcaaacgcgggcaggcgtacgcttctcgcgcttactgacaaaccatcatcaaaaatatcgatggaagggaacatttatgcgaattggcataccaaaagagcggttacccaatgaaacccgtgtcgctgcgacgccgaaaacggtagagcagctactgaagctggggtttagcgtcgctatcgaaagcggggcgggtcaactggcaagttttgacgacaaagcgtttgcgcaggctggcgcggatattgtagacggcaatgctatctggcagtcggaaattattctcaaggttaatgcgcctgaagaagaggaaatcgctttactgaaccccggaactacgctggtcagttttatctggcctgcgcaaaatcctgggttaatggagaaacttgccgaacgtaaggttacggtgatggcgatggactccgtgccgcgtatttcccgcgcgcagtcgctcgacgcgttaagctcaatggcgaatatcgcgggttatcgcgccattgtagaggccgcgcatgaatttgggcgcttctttaccgggcaaatcaccgccgccgggaaagtgccgccggcgaaggtgatggtgattggcgcgggcgtagccggtcttgcggctatcggcgcggcaaacagcctgggggcgattgtccgcgcgtttgacactcgtcctgaagtcaaagagcaggtccagagtatgggggctgagttcctcgaactggattttaaagaggaagccggtagcggcgatggttacgccaaagtgatgtccgaggcgtttatcaaagcggaaatggcgctctttgccgcccaggccaaagaggtcgatatcatcgttaccaccgcgttgattccgggcaaaccagcgccgaagctgattacccgcgatatggtcgattctatgaaggccggcagcgtgattgtcgacctggccgcgcagaatggcggtaactgcgaatataccgtcgccaatcaggttgtgacgacggacaatggcgtgaaagtaattggctacaccgatctaccggggcgtttgccgacgcagtcatcccaactttatggcaccaacctggttaatctgctgaagctgctgtgcaaagagaaagacggcaatattgacgtggattttgacgatgtcgtgatccgtggcgtgacggtgattcgcgacggcgacattacctggcctgcgccgccaatccaggtttccgcgcagccacaggccgcgcctaaagcagcacctgcgccaaaagagccggaaaagcccacttcaccctggcggaagtatgcgttaatggcgctggcgatcattctttttggctggctggccgatgtcgcgccaaaagagttcctcggccattttaccgtgtttgcgctcgcctgcgtggttggttattacgtggtgtggaacgtgtctcatgcgcttcatacgccattaatgtcggtgaccaacgcaatttcagggattattgttgtcggggcattattgcaaattggtcagggcggctgggtcagcttcctgagctttatcgcggtgcttatcgccagcattaatattttcggtggcttcaccgtgactcagcgtatgctgaaaatgttccggaaaaactaaggggtaacacatgtctggaggattagttacagctgcatacattgttgccgcgatcctgtttattttcagtcttgccgggctttcaaagcatgaaacgtcccgccaggggaataacttcggtattgccgggatggcgatcgcgttgctggcgaccattttcgggccggataccggcaacgtggcatggattctggtcgccatgattattggcggcgcgattggcatccgcatggcgaaaaaagttgagatgaccgagatgccggagctggtcgcgattctgcacagtttcgtgggcctggcggcggtactggttggctttaacagctatctgtaccatgacgccagtctggcgccggtgctggtgaatattcatctgaccgaagtcttcctcggtatctttattggcgcagtcactttcactggatcgatcgtagcgtttggtaaactgcgcggcaaaatctcttctaagccgttgatgttgcctaaccgtcacaaaatgaacctggcggcgctggttgtttctttcctgttgctgctggtttttgttcgtaccgaaagcgtgggtctacaggttctggcgctactgctgatgaccattatcgcgctggcgtttggttggcatctggtcgcttctatcggcggggcggacatgccggtggttgtttcaatgctgaactcctattccggttgggctgccgcggcggctggcttcatgttgagcaacgatttgctgattgtgaccggcgcgctggtcggttcgtcaggcgcgatcctgtcttacattatgtgtaaagcgatgaaccgctctttcatcagcgttattgctggtgggttcggtactgacggctcctcaacgggcgacgatcaggaagctggcgaacatcgcgaaatcacggcggaagagaccgctgagatgctgaaaaactcccactccgtcattattacgccggggtatgggatggcggtagcgcaggcgcagtatccggtggcggaaatcaccgaaaaactgcgcgcgcgcgggatcaacgtgcgtttcggcattcatccggtggcgggtcgcctgccggggcatatgaacgtgctgttggcggaggcgaaagtgccttatgacatcgtgctggagatggacgagatcaatgatgatttcgccgataccgataccgtgctggtgattggcgcgaacgatacggtgaacccggcggcgcaagacgatccccgcagcccgatcgccggtatgccggttctcgaagtgtggaaagcacagaatgtcgtggtctttaagcgttcaatgaataccggttatgctggtgtgcagaacccgctgttctttaaagagaatacgcaaatgctgtttggcgatgccaaagccagcgtggatgcgattctgaaagcgctttaatcttttaaacgtgcggcggcctcttcggaggccgtttttatacacttcatcctttacgctgcctctttgttggctgcactcagaaaccccggtcacatcgttatctatgctcccggggatttcttcccttgccgccgcgatgcatcttgaatgattttgtgtatgtattgcattttatcttttgtttaaatcgctaagcagaacggcgatactctgcccgccggtggtctgttcgagggcgattttgacaatgatggttaacggaacggagagcaacatgcccaccggacctaataaccagccccagaaaattaacgacaaaaataccactaaggttgaaagacctaaaccacgtcccatgattcgtggctcaaggatattgccgaagaccagattaatcagcagatagcctgccagcaccagcagcgcatcataaaacccgttaaataccagcacctgaataatgggtggcagggcagcgagcaccgatccaatattaggaatatagttcagcgcgaaggccagtagaccccagacaaaggcgaagcggacatccagcgcggccagcattccccatgcgaccagccccgtcacgatactgatcgctgtttttaacaccagataatgggaaacgctatcaagcgcgcgttgaattgccgccataccttctaccgggcggctcatcatctgctgcagtttttcaggcagttgtggaacctccaacagcataaataccacggtcaatagcaataaaaagatggatgacatggcattggacagttgggtgagcaggttcgttaccagagtcatggcggcgtttggatcgatatatttcgccagctcatcaaccgacacgccaatgccagctcgctgcaaccacggttcaatacgttgcaacggtatcaccaatgaggagcgatattgcggtagggtacgagccagttcatttaatgatgtccccaaataggccagtagtagtaccattaacataacaataatcacaatgagcaatgatacggcgataacgcgcggaattcggcatcgggtcatccgttgcacaacgggattgagaacgactgcaataaataacgccaaaataaagggaacaatgatatctgcggcgaagcggataccgctcagaataactaccagcattcccagcataatgacgatttttagaccattgagcgtgatgatcggttttgccatatcagtccctgttttctgatgccgacacgaataataatgtgatgtcggtcgacctgttctggttaaaatcaaacacttcaggtaaagaagtgaaaatattttgagttaattcctggcttatgatacaaatcaggcgtgttcaactaccgaggacaattatcatccgcgatgacgagaagcaacactgcggataattgtaatattatggacaatatgttcagcgcttttttctccacgcaaacgcatcttcactctacctcctttttcctgcttatcggcgagcagcactggcgtaacgcactttagtctctcacttctgcctgagctggcgcaatgcgctgtgctaactgattttattttttagtttgctgcgtgcagcagactcgaaagagtatattctcatgcaggagaagtgtcatgttttactggattttattagctctggctatcgcgactgaaattaccggcacgctctcaatgaaatgggctagtgtgggtaatggcaatgcgggttttattttaatgctggtgatgatcacgctgtcatatatatttctttcttttgcggtaaaaaagattgccctgggtgtagcgtatgccttatgggaagggatcggcattttatttattaccatttttagcgtgctgctatttgatgaagcattatcaaccatgaagattgccggcttgctgacgctggtcgccggcatcgtattgatcaaatcagggacgcgtaaacccggcaaaccggtgaaggaggcgactcgtgcaacaatttgaatggatacacggcgcctggcttgggctggcaataatgctggaaatcgcggctaacgttctgttgaaattttcggacggctttcgccgtaaatgctatggcatcttatcgcttgccgctgttctggccgccttcagcgcgctttcccaggcggtaaaagggatagacctgtcggtggcgtatgcgctatggggcggttttggtattgccgctacgctggcggcgggctgggtgctcttcggccagcgcttaaatcccaaaggctgggttggcgtgatattgctgctcgccggaatggtcatgatcaaatttgcctgagacgatcgctgccggttggttcaggcagcgattcccgcattaatcctgcgccagagctttcagcttatcgcgaaagccggtgacggatatagcgcggttatcggcgcgccagcgatctttagccgcaggggcggagctttgtacgccaataagctgccatccgctatccgtgtgcaataagagcggcgagccgctgtcgccaggtaacgtgtcgcactggtgtgagagtacggcattctgcgcccagccggtcacgacgcaatcctgatgggaatagagcgcattcagatgatcttccggataaccggactgcgtgacttttcggtctgcggctttcaacgccgcagtgagcgccgctttatcgccggtaaataaaggcactggcgtgataccggaaggtgggtagcgcaatattaccagaccaaaatcccagcttgccgcggcaggcggcacaatccagccatcgccatccgctttcaggcgtcggcccagcgacggttcaacgcggccttcaatgccgtggatttcatagcgccatactccttttcgcgccacaaaacgcagcgcaaccgccttgtctggttttcctttcggtggcgttagcaggcagtgacctgctgtcagggcgatatgcggggagataagcgttgccgtacacaaattaccgctggcggtctctagttgcccgatggcatcccacggcgattgggtaggatcggcgacgggcacccgatcatcatggttaaaaaaaagcgttttaacgtcgctggcatccgtggcgtctgtttcagcccccccggctttcgccataaccggtaaaaaacacactatgcccagtaatacagcaatggttttatgcatatcacactctggtgggtaattatgattattaacaacaaaccctcagtactactatagacgtgacggtaagaaagtgggagtaaaatcagataactacactcaggaaagatagaaatgcgtggcaataacggcgcataaaataagcacgataagaatgagctcaaagcggtagcgagacacttttttgccctcccggaaggcggcgctaaaccagaacaatttagcgccgtaaaaacgggcgcgggggcgcgccgcagcatgttacgacttacgcagccggttgagtagttggttttgacgtggttttggctggcgctttaccaccttttttctggtgctttttagccgcctgcgctttttgctcaacggttttcttatgctgttttttgtggtgctgggtggtctgggttgttttggcaggcgctgcggttttcgcaggcgttgcagtctcagccgcgaatgctgcggaagagagacccattgcagcggcaacaaccagagctaatacttttttcattttgataccctcgatttggttttcattcaaccccactgcggggccggtgaaatgactatatcgctgttatcaaaaggcttccgtgagtgattggtttcggcatgtaacgttatgtacaatcccccggtaacgcgatgtcagcccccaccataataggtagctttacgttaccggccgttatttttggtcgcagagtcggtaatatccgccatccagaataacaggcacaccgtatatgaatccgataatctgggtggtatttacgcttctggcgctggatgcaatcagagaagttatgggcgtatcaagcttgacaggtctgtggtgaacagtgaatcgtggcgtgaaaccagcccggcgatagcgcacgttgctatcgccggattatttcttttcaggcgtgaagacgatgatgtaaccgcgtcccgaccaggatggccagcaccagcattagcgcgataaaaccacctacgccgttccagccgtaactatgccagaatacgccgcctagcgtcccggcaatactggaccccagataatagctgaaaagataaagtgacgaggcctgtcccttcgcccggcgcgcacgcgggccaatccaactactggccacggagtgcgcggcgaaaaagccggcggaaaaaagcagcatcccggcaaaaatcagccaaagcgaggtaaaaagcgtcagtaaaagcccacccagcattactgcggtagagaacagcatcaccggcccccggccatagcgtgaggtcattgcgccagctttcggcgagctccatgtgccggtgagataggctacggataacagtccgaccacggcctggcttaattcccagggggagagcatcaggcgatagccaatgtagttaaacagggtgacgaacgcgcccatcagtaaaaagccttccgcaaacagcagaggtaaccctcgatcgcgccagtggagacgaaaattaataaatagcgttttaggccgtagcgacgtgggacggaaatgttgcgaggcgggtaaaatcttccagaacatcagcgcggacgccagcgcaaagcatccgatggccgccagcgcgatgcgccagttaaaaaagtcggtcatgacgccgcttaataaacgtccgctcattccgccgatggaattaccgctaatgtagagccccatagagaaagcgacaaagctgggatggatttcttcgctcaggtaggtcattcccaccgcggcgacgccgcttaacgacagaccgatcagcgcgcgcataatcagaataccatgccagctggtcatcatggttgataacaatgtgcagcaggaggctaataacaaggcggtgaccatcaccggtttacggcctatcgcatcagaaagcgggccggtaaaaagtaagccgatagccagcatggcggtagaaatagaaagtgaaacgctgctgctggcgggggagacgccaaactcctgggaaagtaccggtagtataggctgaacgcaataaaggagcgcaaaagtcgccaggcccgcggaaaaaagggccagcgtgacgcgcatgaaaggcgctgtaccgcgtttaataaattgaaccggctgagaatggcgttgttcatcgatatcgctcgccgtggcgtcatcgagaatagttgtacgactcacgttaaatccttgctttacatctccgtcaacaggagacgggtataaccgacatgtaaagcatagaaaaagcaaaatattctgtctaatatattaattgtctcaaataagacgttaaaaatatgaatatcgaattacgtcatttacgttactttgtggcggtagcagaagagctgcattttggtcgcgccgccgcgcgcctcaatatctcgcagccgccgctgagtcagcagatacaaattctggagcagcaggtcggcgcgcgattactggcgcggaccaaccgcagcgtagcgttaaccgccgccgggcgacagtttctggtggatagccgacacatcctgagtctggtaaacgacgccgccgctcgcgccgagcggttgcatcagggcgaagcgggtgaaatccgtattggctttacgtcttcagcgccttttattcgggcggtatcgcataccttttcgctgttccgccagtcctatccgggagtgcatatgcaaacgcgtgaaatgaatacgcgtgagcaaatcgcgccgctcaacgaaggcgtactggatattggcttgctgcggaatacgccgctgcccgacacacttaatcgcgaggtgattttgcatgagccgcttatggccatgatcccgcgcgaacatcggctggcgcaaaagccggtcgtcagtctgacagaactggcggaagaacctttcgtctttttcgacccacatgtcgggacgggcctctacgacgatattctcggcctgatgcggcgctataacctgtcgccgaccatcacgcaggaggttggcgaggcaatgaccattatcggtctggtggcggcggggctgggcgtctcgattctgccggcatcctttaagcgtgtacagatgagcgagatgcgctgggttcccctggcagaagaggacgccgtatctgaaatgtggctggtatggccaaagcatcatgaacagagtcatgccgtacagcggttttgccaactgctattactggctgcccgacgggattaattacgcttaaaaagggtgaaaatgtgcagttaatcacacggctaagcaaaaagttgacggcgagtattgaagtgtttcaccatagcacacagattatttcggagcgcgaaaataaagggagtgagcggtggttgctgatagtcagcctgggcatatcgatcaaattaagcagaccaatgctggcgcagtgtatcgcctgattgatcagctcggaccggtatcgcgaattgacctgtctcgtctggcgcagttggcgcctgccagtattacgaaaattgttcgcgaaatgctggaagcgcatttggttcaggaacttgaaattaaagaggcgggcagtcgtggacgtcccgccgtcgggctgatggtggaaacggaagcctggcactatttatctattcgtattagccgtggcgaaattttccttgcactgcgcgatcttagcagcaaactggtggtagaagagtgtctgccgctgccgttaaccgaagccacgccgttgcttgagcgaattattacgcacgttgatcggttttttacccgccatcagcagaaactggagcgtctgacatccattgccattacgttaccgggcattatcgataccgaaaacggcgttgtgcaccggatgccgtattacgaagatgtcaaagagatgcctttgggagattcgctggagcggcacactggcgtaccggtttacattcagcatgatattagcgcctggacgatggcagaggcgctttttggcgcttcacgcggcgcgcgcgacgttatccaggtggtgattgatcataatgtgggggcgggcgttatcaccgacggtcatttgcttcatgcgggtagtagcagtctggtagagattgggcatacccaggtcgatccttatggtaagcgctgttattgcggtaatcatggctgtctggagaccatcgccagcgtcgatagcgtgctggaacttacgcagcttcggcttaatcagtcgatgagttcaatgttgcacggccagccgttaacggtagattcactgtgtcaggcggcgatgcagggagatctattagcaaaagatattattagcggcgttggcgcgcatgtcggacgcattctggctatcatggtgaatttatttaatccgcaaaaaattcttattggttcgccgctaagtaaagcggctgatatcctttttccggccattgctgacagtatccgtcaacaggcgctgcccgcctacagcaggaatacggttgtggaaagcacgcagtttaccaaccagggcacgatggccggggcggcgttggtaaaagacgcgatgtataacggctctttgttgattcgtctattacagggttaacattttttaactgttgtacaaaaatttgcgctaactcaagctgattgcccttgccatatcttagactttctccactgtattattttcctggcttatattttcgaagcataacggtggagttagtgatgctgaagcgtttctttattacaggtacagacacttctgttgggaagacggtggtttcccgcgcattactacaagcgttagcgtcgagtggtaagagcgttgcagggtataaacctgtcgctaaagggagcaaagagactgcagaagggatgcgcaacaaagatgcgctggtattgcaaagcgtctcttcgctggagttgccgtatgaggcgattaatccgatcgcgttaagcgaagaagaaagcagcgtcgcgcatagctgtcctataaattacaccttgctgtccaacggtctggcgagcctgagcgataaagtggaccacgtggttgtggagggtactggcggctggcgtagtttgatgaatgatttacgtccattgtctgaatgggtggtacaggaacagttaccggtattgatggtggtagggattcaggaggggtgcattaatcatgcgctactgactgcgcaagctgtcgctaatgatggactgcccttaattggctgggtggcgaatcgtatcaatcctggcctggcgcattatgctgaaattattgatgtgcttgggaaaaaactgccagcgccgctgattggcgagctaccgtacctgccgcgcgccgagcagcgtgagctggggcagtatattcgtttgtcaatgctcggcagcgtgctggcggtagatagaatcatggcgtaacgttcgcgagagcactgacgcgactacacaggcaatcagcagaccggggagtaactgatactcgccggtcatttcacaaatcatcagggtggacattatcggcgcatgggttgtcgccgccagtagcgtcgccatacccgccagccccaataaaatcgctatttcatccgagcctggcagccagaatccccatatccgacccagaaacattccaatggataatccgacaaataatgttggcgtaaagacgccgcccggcgcgccagacccgctgctggcgagcaccgccaggattttgcacacaaaaattccgccaatcagcgagaatagcggcggggagagcaaaaatgattgtacgacgctatagccgtttccccataccgtgggcgtgagtaacgacagtaatccgacaataagcccgcccaacgccagttgccagggcggggacagttttaaacgtaagaaactattatggctggccgtcatcagccacatcagcaatgggccgcacagaccggcgaccaggccggtactgactatcatgacgtactcccgcgcgtggagatcaacggtcagatgtacggtatagagtagtgaatcgctaccgtttaatacatgggtggttagcagggcgacgacggcggaaacgacaaccgggccgagggaagccagcattaaggtaccgaacaggatctccgcgataaacagactgcccgccagcggcgcatggtaagcgcccgccatgcccgcagcggcgccgctggcgatccataatttccattcctcacgcggcgtgaagcgtcgggcaaagctggacgccgccagcgcggcgaggaggatcattgcgccttcgcgaccaattgcgctgccgctgaccacgaccagcagcgaggccagcgatttcaccagactggcgccaacgtcaaattgcccgtcggtttgcaatgcttccatatagtcagtgggcgcatgggggcgctgttggttcattttttgccacccccacagcaacagaccagcggccaggccgccaagcgccggcgtaatcagccgtcgccagggcgaaagcccctcagccgcattcaccagactgccggtgtcattactcaggaaaatccactccagcaattgcatcgcatgacggaaggcggcgacagccagcgccgcgagaataccgatgagcgtagcgatcagcaggcgacgaaacatcgcgcgcagatccgggtaagcgtgtaaacgatgcatgagcgggtaaacagggagtttcaggatagcctattctgcggggaaatggcgtcagacgcaaaagcactatgtgcgatataatattgcgtacaataatgatactgccggatagcgagaggctatccggcggcaacgttagctgttttcgtgaatatttagcgcccgacgcgtgcggcctgagctgagatagtcggcgatgtaatcctgagagatttcaccgttatagcgtccgtcttcatcaacgatcggcatccagctggtattactttcgtacaatctggacagcacaatacgcaggttatcttccgctttgcccgtaatacggaaaggatgggtgatatcggcgcagattccgctggcgttccgcgcttcccggcgcttcacaaatcccagtggcttaccgtcgttgtcaatgacggtaatggcgcgaatatcgtgatcatccataatgccgaacgcctcgcttaacggcgtggaaggccgcgcggtaatggttggctgttggtcggtcacatcgcctgcggagaccagtagcaaacgctttaacgttctgtcctgaccgacaaacgacccgacaaactcgttagccggtttggccagcagttcatcaggactggcgcactgtacaattcgcccctgacggaacacggcgatacggtcgccgagctttagcgcttcgtcgatatcatggctgaccagcatcacggtcttttttagcttacgctgcatatccagaaactggttctggatcacttcgcggttaatggggtccaccgcgccgaagggctcatccatcagcagtaccggcggatcggcggccagagcgcggatcacgccaatacgctgttgctgtcccccggacatctcctttggatagcgatgcagaaattttctggcatccagcgccaccatgtccatcaactcttcggcgcgttgcttgcagcgtgctttgtcccaacccaacatgcgcggcacaacggtaatattttcttcaatcgtcatattaggaaacaggccgatttgttggataacatacccaatattgcggcgtagcgttaccgcatccatatcgttggtattctcgccgttgataagaatattaccgctgctgggcgcgatcagccggttgatcatctttaacgtggtggttttgccgcagccggagggaccgagtaagacgcacatttcgccttccggcacgttcaggttgacgttgtcgacggcttttagcggctgaccctttttctgtacaaattgtttggtgagattttccagttttatcattatcgtatccccttcggtgtcagtacgacttgcagacgatgcaacagccagtcaagtacaattgccagtagacagatcatcagcgcgccggcaattaacatgcgaatatcactgccgctaatgccgtttaacagtagcagccccagaccgccggcgccgatcaccgcggcaatcgccatcacgccgatattcatcactaccgcggtgcggatacccccgaaaataaccggtagggccattgggatttcgacccagcgcagccgttgccagaaagtcataccgatgccgcgtcccgcttcacgcagaccgggcggcaaactatcaagcgcagtatgggtattacggacaatcggcagtaaagagtagagaaaaacggccgtcacggcgggcagaacgccaataccatgtccgatcagcgaaaagagcgggatcattaatccaaacagcgcgatagacggaatggtaagaagtagcgtggcggcgcccaataccggcgttgccagccatttgtggcgtacaatcaaaacgcctaacggtacgccgatgataatcgccagaccgacggccagcgcgaccagccagagatgctgaaaggtaaggctggcgagatagcctgcgttatccagcatataatgtatcgtatccatagtcgctccttacagcagacctttgtcctgcaaaaattgatgggctacctgttgcggcgtgcgatgctcgatatcgacctgagcgtttagggtcgatatcacatcgttattgagcaggccggaaagggtgtttaaggcgtcatcaaggccaggattggcttccagcacctctttacgcaccacgggcgtgacagcgtaacttggaaagaagcctttatcatcttccagcactttcagatcaaaccctttcacccgtccgtcggtggtatagaccagcccggcgtcaaccagcccatcccgaacggcgttatagaccagccctgggtccatctgtcgtatttgcgggcgatcgagctgcatctggtaggcttgctgaaggggcttcattccgtcgctgcgcccggcaaattccagatcgaggccgagcatccagttgtggtcaggatcgttctgccggacctgttcgatttttgccaccatttgcgagatggtggtgatattttccgactcggcgcgtttgcgctgcatcgcgaacgcgtaagtattgttcatgtcagccggtttgagccataccaggcccagcttcgcatccaggcgttttaccgtgtcgtaggtttcctgtggactcatgcgcttatcgatacggttgaaaataatcagcgatgtaccggtgtattcccaggtaatatcaatttgtttattcaccatcgcattacgtgaaatcaccgcggcgatattggtttgcggctgaacctgaaagcctttcttctgcaaatactgaacggtcatagcggaaagaatatgctgttcggtaaagcttttggtggcgagaaccagcggcgcggcctgcgtctggctactgaacaacagcgttgcggcaagccatcccaacaggtgttttttgaatctcatttaacgctccttattgttatttatgcgttcagacggtatgagggctaaggcgtcgcccaaaccaggcaagcagagtgtcaagaatcagcgcgaataacgccgtggccgttgcgccgaggatcaacgtcggaaaatcgttgagataaattcccgggaaaatcagctcgccgtagctgctggcgccgatcagaaaggccagcggcgcggtgccgacattgatggcggtcgcgatgcgaataccggacagcatcactggccacgcattaggtagctctacctggcgaagccgctgccattttgtcatcccaatcccgttcgccgcttcaatcagtgaggcgggaacggaacagaggcccgcataggtattgcggacgataggcagaagggaggccagaaatagcgcgacaatggcgggcgtatcgccgatcccgataatcaccatcgctaaggccagaacggccagcggcggcaaggtattaccaacattaaagatttgcatgacatattcagcaaatccttttgccgcaggtcggctgagtaaaatcccgctcgggataccgaccagtaaagcaaaaaacatggacgtaaagaccagcatcaaatgccgttgtccgagatacagcagatcgacctgacgcgctttcagcgtctccagaccgattccccagataaacagcgccagtaacagcaaaatgacgatagtgaacccaagtacacgttttagggtgagggtgtgcattgcggtgtgtctccctgtttgcatgtgttatggcgacgttaagagtcgcgtgttgttatgccatgttccggcagggtgctttgagctatagcaacaggttgggaaggattccagcgaagcgtgatgtttaacactattaaacatctattaacaattatgctttgcccttatgcggcttagggtgaacattcacgataaagaattatcttaaaaatagaagcgcggtgtgacgttgtcactttttgtagataaaaataggccgtaatgagagaaaaggcaggtaaaatcctgccttttgtggggattaacggaataacggttttacagcgacgggaataatgagttgagcttgccattgcgccagcgtcagacgcgccagttgccccaacgcctgataaaacggatgcccggcatgatcgataaatacgtccagaaagcgggacgaccacggaaacagatgccaggccaggagttgttcgcattcatgatgacggtcgttctcggcaagccaggccgccagtagcaacagcgacccaaaatgatcttctggctcgttttgctgcatttcaaactgaattccgttttcgcgcatccactgacgtagcgccaatgtagaatcgccaaataatacgctctcacgatccagccagacggaaccccacggcggagacggcagagcgtaagggccgataaacagacgctgccaggcctgtggcaacgactcttcgctgtgggtcttaaacatagccgccacaggcgcaagcgcctcggcatcaagcggccactgcgcctgccagtcgtcgtttaatagcgcctggaccagaggagcggtttcgtggctttccggcgaataataaaacaacgcgccaagaacacgcgccgttactgcaaaatcatcacgttgtaaaaaagtggtcattcaaacaatcccgaaaggtgcgggtcgccccgcacgcataaattaacctgcgacggccatacctacggtcatatgcaggccataaaaaagtccgcggccaataatttcgcctgccagcaccagcacgacaccgagcagcaaaccaacggtatgcggttcgcggcgacggattagcggacatagccagcagcctaatccggcagcaagcaagacaatgcgccagacctgtagcataccgtaatccggtgcgagatggctggcctgttgcacggaactgtgaatggttgagagagacagtccttgtagtacgatgaccgtcacgcacaccaccaatgccaggccgctaatactggcaaacgtcacgctgcaaaatgggacgcgcgcgatgcgtagcagtaacgccgcaaacaccgggccgcacaggaatgccgtgaggaaaaaggccagcgtggtgtagccattataccaggttggcacggtatctatctgataaacgagcgtcattgcccagatgaatgcaacgccgagcgccatactgaccagcagccacactttacccagcgccgggggcattttaccgagtaccgccaccagccaccagatgccgcctacggcaaagaacaccgatcctgcggcgatttcattactcagtgcggaagcgcctacgcggttaagcgagttaaacgcgcgcatcggcgagccgagatgcataatcgacgcgaggaatcccagtcccatcaccagccacagaaaaaacatgctgcgcacgatgcgctgacgggcgatggtatcgtcttttgccgtcagccagcccagtccgctaacgattaacgcgccgaccacgcactgaccaaagaccgtgaagatcatcaacggccattcatgccatccacttcccatcttatacctccttcggattggccagataaccggtagtgtccccggtcgggcggctgttggcgttgggtttaatcacaatattcggcttcgtgaaatgcgcgcgcggcaacggcgcgacggcagccagctcaccgtgttttttacgcagttcgtctatcgggccaaagtccagtgcccgcagcgggcaggactccacgcaaatcggtttcttgccgtcagcgacacggtcataacagccgtcgcacttggtcatatgacctttggccgcgttgtactgcggcgcgccgtacgggcaggccatgtggcagtagcggcagccgatacagacctcttcgttcaccaccacaaaaccgtcatcgcgcttgtgcatcgcgccgctcgggcagactttggtacaggccgggtcttcgcagtggttgcatgaaatggagagataataggcaaagacgttctggtgccagacgccgttatcttcctgccagtcaccgcccgcatactcataaatgcggcggaagctgacgtcgggagtgagatctttgtagtccttgcaggccagttcgcaggttttgcaaccggtgcaacgactggaatcaataaaaaatccatactgggttgtcatcggttactccttacgccttttcaacctgaacaagattactgtgtgacggattacctttcgccagtggggaaggccggtgcgacgtcagaatgttaatggagccgccgcgatcgactttgtcgccaaacatgtcggcatttaaccaggcgccctggccgatagcggtgacgccgggcaatatgcgcggcgtgacttttgccggaatgagcatctctccattctggttaaagacccgcacggtgtcgccatgctgaatgccgcgcgcttgcgcatcaatcgggttgatccagatctcctgcggacacgcctgttgcaggatgtcgatattgccgtagctggagtgggtacgcgctttatagtggaagccggttagctgtagcgggtagcgctgacgaagcggatcgtcccaaccgtcaaagcctggcgtataggcgggtaaaggatggataatctcatctttcttcagctcccacgtgttggcgagggttgccagacgctcggaatagatttcgattttaccggacggcgttttcagtgggttggcggcagggtcttcgcggaaggcgcggaaagcgacgtagtgctcctccgggcattttttcttgaaaatccctgtctgtttcatctcttcgtaatccggcatttccgggttacgcgctttggtttttgcgtgcaggtatttgacccactcatgctgcgtgcggccttctgtgaaggtctggtatacgtccggaccaagccgtttagccacttcactgagcgtccagtaaatgggctttctttcaaatttcggcgaggtggcgggctgaccaagaatgacatagcccatattgcctgcggattcgtgggaaatcagatcttcctgctcggtcggcattaaatcaggcagcagaatgtcgcaatattttgccgacgcggtcataaagtgctcgatgccgacgatcatttcacatttactgtcgtcctgaagcacctcgtgggtgtgggcgatgtcgccatgctgattgatcagcgtattactggcgtagcaccacaaaaatttgatcggcacgtcgagcttgtcttttccccgcacgccgtcgcgtgtggcggtcatttccgcgccatgatcgatagcgtcggtccaggtaaagaccgaaatctgggtttttaccgggttctccagcatagaaaaccattcgacgcccagatcccaggtgccttcgcgcacgccggaattaccgccatttatgccgacgttaccggtgagtacagacagcatggcgattgcgcgtgcggtctgctccccgttagagtggcgttgcggtccccagccctggcaaatgtaagccggtttcgccgagccgatttcccgcgccagttgaatgattttttccgccggaatactggtaatctgcgcggcccattgcggcgttttagcaataccgtcgtcgccctgacccaaaatataggctttatagtgcgcgttacgcggggccgaggcgggcagagtggtttcgtcgtagccgatgcagtatttatccagaaacggtttatcaataagatcttcggtaatcagcacccaggcgattgccgccgccagcgcgccatcggtacctgggcgaatcggcagccactcgtcttctcggccagcggcagtgtcgttataacgcgggtcaatgacgatcatccgggcgttggagcgctcgcgcgcctgttcgacatagtatgtcacgccgccgccgctcatacgtgtttccgcgggattattgccaaacatcaccaccagttttgtattggcgatatcatccggactgttgccgtcattgccgccgaacatatagctcatggccgcgctgatttgggcggtgctgtagctaccgtaacggctgagatagccgccgcaggcgttcatcaggcgatacggtacgttagaattggtaatattgccgccgtccacgccggtaccgtaaagcacatgtaccgcttcgttgccgtagtccttgaggatacgtttcaggttatcgccgatggtatccaacgcttcatcccaactgatacgttcgaatttgccttctcctcgtttaccaacgcgtttcatcggatatttcaggcgatcgggatgattcatccggcgacgaatagaacggccgcgcaggcaggcgcgtacctgatggttgccatattcatcgttgcccgtggtatctgattcaacccaatatacggtgtcatcttttacgtgcaggcgcagcaggcagcggctgccgcagttaacggtacatgaactccagaccgctttttctgccacattgccggatgcgaggtctgctgcggcgtgtgcgatgcgggagaacggaagggtgaaagcgctactggcaagcgcaaggctaccgatagcggaggttttcaccaggcttcgtcggctgagactggccgccattaatgcctcagggttggtgattttcataacagctcactatgctcatccaaaaaagagttttaaatgtcgttgtgttcgcaaaacggggagctccgggcgcgtaaaaacgtcccggagcaggcggcttagattttttcgatttccaccagatttgtatgttgaggattcccttttgccaggggggaaggacgcagcgtcgtgagcgtattgatgcaggcgccgtggtcaattttatcgccagccatatccgcattatgccatgcgccctgacccatcgcgctgacgcccggcagaatacgcggcgtgactttggcgggtagacgcacctctccacgatcgttaaagacgcgaaccttatcgccattcgcgataccgcgtttttgcgcatcgagcggatttatccacacctcctggcgacaggcggcctgcagaacatcaatattgccgtagcttgaatgggtacgggatttatagtgaaagccaaacagctgtagcgggaaggtgctccgcttcggatcgtcccatccttcaaaagtaggggtataaatcggcagtgggcttatcacgtcgccttccgccagctcccaggtactggcgatgtgagcgagtttgcttgagtagatttcgattttaccggacggcgtttttaacggattggcctgcggatcttcacgaaattttttataggcgacaaagtggccgttgggatctttgcgtttatagatgcccatttttttcagatcgtcatacgcgggcaatgccggatctcttgcctgcattttggcgtacagatattgcagccattgcgcctgtgtacggccttcggtaaaccgctgatacacatcgtcgccgaggcgtctggcgatttcgctgagtacccagtagatgggcttgcgctcgaacttaggcgtcgtcgccggttggataaaaatcagatatcccatattgccggcgtaatcattggggatgatatcctcctgttcgacggtcatgagatccggcagtaaaatatcagcgtacttcgcggaagaggtcataaagttgtcgatgaccacaatcatttcgcatttcgcttcatcctgaagaatttcatgggttttattaatatccgaatgctgattaatcagggtgttgccagcgtagttccatagaaatttgatcgggacatccagcttatctttgccgcgtacgccgtcgcgcagggcggtcatttccgggccgcgcgcaatggcgtccgtccagctaaagcaggagatggcggttttaacgggattctccaggaccggcagacgttcaatggtaatggtgtaagtggattcgcgtgcgccgctattaccgccatgaatgccgacgttgccggtcagaatcggtaacatggcgatggcgcgagcggtttgttcgccgttcgcctgacgctgcgggccccaaccctgacagatgtaggccggcttgacgctgcctatctcgcgcgccagtttgataatccgatcggcggggatgccggtaatatgcgatgcccactgcggcgttttggcgataccgtcctcgccctgacccaaaatataagccttataatggccattggggggcgcgtcagccggaagggtcttttcatcgtagccgatgcaatagttatcgagaaaaggctggtcaacgagattttcgttaatcaatacccaggcaattcccgccaccagcgcggcatcggtgccggggcgaatcggtatccactcgtcttcacgtccggcagcggtatcggtatagcgcggatctattacgatcatgcgcgcatttgagcgttcacgcgcttgctccagaaaccaggtaatgccgccgccgctcatgcgtgtttcagccggattattgccgaacatgaccaccagtttactgttttcgatatcagatgtgctgttgccgtcgttggaaccataggtgtagggcatggcgcaagaaatttgcgcggtactgtatgagccgtattgattcaacgaaccgccgtagcagttcatcaaacgcttcaccggcgaggcggcaggcgacgagcgggttatgttgccgcctacgatgccggatgaatagtggatataaacggcttcattgccgtaggtctctacggtctttttcaggctggcgctaatggtgtccagtgcttcctgccagctaatgcgttcaaatttgccttcgccgcggcggccaacgcgtttcatgggatagttaaggcgatccggatggttaatacgccgacggattgaacggccccgcaggcaggcgcgaacctgatgattgccgtagacatcgtcgccagtgttatcagtttcaacccaccagacttcattatcttttacatgcagacgcagggcgcagcgactgccgcagttgaccgaacaggcgccccagacgattttatcttcttcgttgcgcatagcctgctgcaccgccgcggccgcggtacgcatcccaaacggtaaagatacgcctccggcagccagcgccagtgagccaagcgccgctgatttcactaacgtcctgcggctaacgcctgtttgttgcttttctccgggcatcactcactccattgtcgttattatttcgctatatattgataactataacgaaattattaacatgctaatgatgtaatgagtttacccctttgggagtaaggattattaatccatgtcaaagagcgttaccctccggacccggagggcaggaggaggttattgcggttcggcggatgaaccgtcctgagcgggagaggtattggctggcgcattgccgctgctggtgcgggtataaagaattttatgcgtgtcgttcgcgcaatggcccaccacctgtgagtccggctgatcggcctggtcgttaggaacgatagtgagcgtaaaattatccgccggcacgccgttattgatgatacgttgttcaatatcgctttttactctctcgcacgatcccggtgccgccatcaccagcgagggggcgctaactaacgccagagcggctattgcagttgcgattttcatcatgaactcctgtgattaatgacgatgttctaagcttagcatttttcgtgtaaataactgtatttgctaatatgatgataaatatcttttcatcctggtgatacgtgtgaagaaaccccttttactgacgttattgtgcatgatactggcaggttgtgataacccgaaatcccttgagtcttttacgccggaaatggccagtttttcgaacgaatttgattttgatccattacgtggtccggtaaaggatttcagccagacattgatgagtgagaatggcgaagtggcgaagcaggtcaccggtacgctttcacaggaaggctgttttgatacgcttgagttacacgatctggagaataatacggggctggcactcgtgctggatgccaattattaccgggatgctcagacgctggaaaaaaaggtgcagttacaggggaagtgccagctggcggcgttgccttcggcgggcgtgacctgggaaacggacgacaacggttttgtggtatcggcgacgggcaaagagatgaaggtcgagtaccgctatgatagcgaaggctatccgttaggtaagacaaccataaactcgcagaatacgctctctgtgacggcaaaaccctccgcggacccgcgtaaaaagctggattatacggcagtcagccgggtggatgatcgacaggtcggcaacgtcacacagagctgcgaatatgatgcgtacgcgaaccctgttgactgccggcttgttatcgtcgatgagagcgttaagccggcagtgtcccaccattacaccattaaaaatcgtatcgattactactaaaccgggcgcggtgcgactctccgtgactaccgcgccgcgcttactgcgcggtgggtttcaggagtgtagaaccggacgttttatgttcatccagatactgctgctggaagatacacatgcggatggtgttacggtattcgccgttaatgaagaactcatgaatcagctcgccttctactctaaacccgagtttacggtagatgtgaatcgctttttcattctctttatcgacgatcaaatacaatttatagagattgagtacggtaaatccgtaatccatcgccagtttggccgcgcgtgacgccaggccttttccctggtactccggcgagataataatctgaaattccgcccgccgatgcacatggttaatttccaccagttctaccagcccggcgttttcaccgtcgcattcgacgacaaagcgccgttcgctttggtcgtggatgtgtttgtcgtagagatccgacagttcgacaaaagcctcatacggctcttcaaaccagtaacgcataacgctggcattattatcaagctggtggacaaatcgtaaatcttcacgctcaagcgggcgcagtctgaccttgtagtcacttgtcatactgtatccttacacttccttttagttatcctgcatcagggcgtaataacgcgacctgtacgacgatccagacaccgcagcgtattgggctcccaataggcgttgatgttggcgctttgctcgcatttatcgcggttatcaaaggcggcatcggctttgtcccactctttttctgcgcgggtattcactttctgacgcagactgcgagtgtcgttccattgttccttttccatcgccgcttcctgacgactttgtgcgctatctcccgattcaatcaccagtttactggtttcagcgaatgcggaagtagtatatacaacggccgccaacgtaagcattgccgtcaggcacaggcgtttgctcagcgtattgttcatcacaacatcctttcattagaggggaaaaagcggtaaaccacctgtaaattctacaccaatccttatgcctggcatatacacaagaatggccggataaccgtaacgatattctgttgtattatcacttatcatttcgtaaccaaatgaatctcatgctaaagacgactctgcttttctttgtcaccgccctctgtgaaatcattggatgttttcttccctggctatggcttaagcgcggcgccagcgtgtggtggcttctgcccgccgctgcgtcacttgcgttattcgtctggcttttgaccttgcatccggcggcgagtgggcgggtttatgcggcttacggtggggtatatgtctgtactgcgctcctgtggttacgtgttgtcgatggcgtccggctcacggtttatgactggtgcggcgcgctgatcgcgctgtgtggaatgctgattatcgtcgtcggatggggacgtacgtaacattgccgcgcgaccagaacattttgtgatctggcagcgctttttacatcaatatacttgtatggtagtagctcagttgggtaaatttcctgcatcccataatgcgatgtaaggaataaaaatgaagattgtaggggctgaagtttttgttacgtgtccagggcgtaacttcgtcaccttaaagataaccacggaagacgggatcaccggtctgggggatgccaccctgaacggacgcgagctcccggtggcctcgtaccttaccgatcacctgtgcccacagctcatcgggcgggatgctcgccgcatcgaagatatttggcagttcttctacaaaggcgcgtactggcgccgtggccctgtcaccatgtccgccatttccgcggttgatatggcgctatgggatattaaagccaaagccgccaatatgccgttgtatcagttactcggcggcgcttcgcgtgaaggcgtcatggtgtattgccataccacaggccacaccatcgacgatgtgctggaagactacgcgcgtcataaagagcaagggttcaaagcaatccgcgtgcagtgcggcgttccggggatgaaaaccacctacggcatggcgaaaggcaaggggctggcctatgagcccgcgacaaaaggccagtggccggaagaacaattgtggtcaacggaaaagtatctcgattttacgccaaagctgtttgacgccgtgcgtaatacgttcgggtttaatgaacatcttctgcacgatatgcatcaccgactgacgcctattgaggctgcccgctttggcaaatgtattgaagactatcgtttgttctggatggaagacccgacgccggctgaaaatcaggcgtgcttccgcctcatccgccagcatacggtcacgccgattgccgtaggcgaagtctttaacagtatctgggattgcaaacagctcattgaagagcaattgattgactatatccgcaccacgcttacccatgccggtggtattaccgggatgcgccgcattgctgattttgcctcgctctaccaggtgcgtaccggttcgcatgggccgtccgatctgtcgccggtttgtatggccgctgcattacatttcgacctgtgggtgcctaactttggtgtgcaggagtttatgggctactccgaacagatgctggaggttttcccgcataactggacgttcgagggcggctatatgcatccgggcgacaagccaggactgggcattgagttcgatgaaaaactggcggcgaaatatccttacgatccagcctatttgccggtggctcgcctggaagacggcacactgtggaactggtaaggagcgaaaaatgaaaagcatcgtaatcgaaaaaccgaatacattaactatcgaaacgcgcgcgcttccgcagcctgcgccgggcgaagttcgtattaaagtgaaactggcgggtatctgcggttccgacagtcatatttatcggggacataatccctttgcaaaatatccccgtgtcataggccatgaatttttcggtgtcatcgacgcggtaggcgacaacgtcaatcacgaccggataggagaacgggtatccgtcgatccggtgatcagttgcgggcattgttacccttgttcagtcggtaaacccaatgtgtgtacctcgctggtggtgctgggcgtgcatcgtgacggcggtttcagcgagtatgcggtggcgccggcccgtaatgctcatcgcataccggacaacatcgcagatcatcatgccgtcatggttgagccgtttaccattgcggcaaatgtgacgggacaagtgaatccgaccgagcaggacgtggcgcttatctatggcgcaggcccgatgggactgacgaccgtacaggcgctgaagggggtttatcaggttaaaacggtcatagtcgttgatcgcattgaagagcgtttagcgatggcgaagcagagcggcgctgactggaccctcaataatggtcaacattcactggcggaatttctacagcagaaggcgctaaagccgaccttgattgtcgatgccgcctgtcatcccgctatcctgcaagaggcgattacccttgcatcgcctgcggcacgcattgtcctgatgggattttccagcgacccgtgtgagattgtacagcagggtattaccggaaaagagctggctatttattcatcgcgtcttaatgccaataaattcccggtcgtgattgactggctgaataaagggcttattgatccggataagctgataacgcatacatttgattatcaacatgtcaccgacgcgattgagcttttcgagaaagaccagcgtcaatgctgcaaagtcttactcacgtttgcgaaataatataaatacttgcgagtaagtggtacgcatcttacctcttagagattgcctatatgacacaaataaagcatgaacgatcgactcaggatttagtgcgcgctgccgtatctggctggttaggcaccgcgcttgaatttatggattttcagttatattcactaggcgcggctctggtcttccatgagatatttttcccggaacagtctgccgcgatggcgcttattctggcaatgggcacctatggtgcaggttatatagccagaattatcggcgcctttgtttttggtaaaatgggcgaccgcatcggacgaaaaaaagtattgtttattaccatcaccatgatggggatctgcaccacgctgattggcgtactgccgacgtatgcgcaaatcggcatttttgcgccagtattactggtaacattgcgaattatacaggggctgggcgccggggcggaaatttccggcgcgggtaccatgctggccgagtatgcgccgaaaggaaagcgtggcatcatttcctcgctggtcgcgatgggcaccaattgcggtacgttgagcgcgacggcgatctgggcggtgatgttctttgcgcttgaacgcgaacaactgatcgcctggggatggcgtattcctttcctggcgagcgtcgttgttatgatattcgcgatctggctgcgaatgaatctgaaagaaagtccggtattcgaaaaagtaagcgaaggtgaaaaatcgccagcgttaacgcctgcgtcagaaaatacattgggcgcgatgtttaccagcaaatctttctggctggccaccggtttacgttttggacaagcggggaattcagggcttattcaaaccttccttgccggatatttggttcagacgttattatttaacaaatctatcccaaccgatgcgttaatgataagttccgtaattggttttatcactatcccactcttggggtggttgtccgataaatacggtcgtcggctgccgtatataatattgaatatctccgcgattattctcgcctgaccgatgctgtctattgtggtagataaaacgtatagccctggcgtaattatggcggcgctcattgttattcataactttgccgtgctgggattatttgcgctggaaaacatcaccatggcggaaattttcggatcgcgtaatcgcttcacccggatggcgatttcaaaagaggcaggggggctggtggcggtcggttttggccccgtcctcgcagggatcttttgtaacatgaccgattcctggctgcccatcttaattatgctggtgctctactcgtgtattggtctgatttctgcgctgttgatgccggaggtcagagatcgcgacctgagtctgcctgaggatgcggcggaagcgacagcggcagagaagttacgccactccgcaacccagacgagttaaatcgtgtcgacggtatggccggaacgctaatgcggtttcggccatgctgtccggtcacttttgtttaattagcgtaaatccaaatgcaccagggcaggcgttactctgcgactgttccgctttcagaatatagaggttataaaatgcaaaacaggcttttatcggcaaaggcgacgcttcctgattacgatcgcgcggcgctggcggcgcggatggtccatctcggttttggcgcgtttcatcgcgcgcatcagggggtttacacagatattctggctgcggagcagcatagcgactggggctattatgaggttaatcttattggcggcgaacagcagattgccgatctaaagcagcaggataacctctataccgtggcggagatgtcggcggaagcctggacggcgcgtgtggtgggcgtcgtcaaagcggcgttgcatgtccaggttgatggtctggaacgtgtgctggcggcgatgtgcgaaccgcaaatagcgattgtgtctctgaccattaccgagaaagggtattgtcattcgccagccacgggccaacttctgctggaacatcccatgattgccgccgacctgcaaaatccgcatcaaccgctaacggcaccgggtattattgtcgaagcgttagcgcgtcgtaaagccgcaggcttaccggcatttaccgtgatgtcctgcgataacatgccggaaaatgggcatgtgacgcgtcaggttgtgacggcttacgcccgggaggtggatgcggaactggcgatatggatcgagcaaaacgtgacatttccgtcaacgatggttgatcggattgtccctgcggtcacgccggagacgctggataaaatcgaacaactgaccggcgtgcgcgatccggcgggcgttgcctgtgaaccgtttcgtcagtgggtgatagaggatacgtttgtggcgggtcgtccgctgtgggaaaacgcgggcgcgacgttggtcgccgacgtggttccgtttgaagagatgaaactgcgaatgcttaacggcagtcattcattcctggcttatctggggtatcttgccggctatcagcatattaatgactgcatggctgacgacaactatcgtctgaccgcgcaggcgttaatgttacgcgagcaggcgcccacgctgaaagtccagggggtagatttacagcgttatgccgatcagttgattgcgcgttaccgtaatccggcgctgcgtcatcgtacctggcagattgcgatggatggcagccagaaacttccgcagcgtatgctggactccgttcgctggcatcttgctaatcatagcgattttgatttgctggcgctgggcgtggcggggtggatgcgttacgttggcggcgtggatgagcagggtaaggcgatcgacgtcagcgatccgctattgccggttattcagcgcgccgtggcaaacagtgaagaaggcgccagtcgtgttaaggcgctgctgggaatggctgaaattttcggcaacgatttgccgcaggcggcgcggtttacgcaaaaagtgcaagaagcctatgacagtttactgacatatggcgcgaaagcgagtgtggcgaaatatgccgagcggttgaaatagcgtaacagagacccggtagcattatgctaccgggaaggccggagcggttcttagcggccagtggtatcagttcatgccaagacgaatcagttcgaccggcgcgaatttaccttcacaaccttcgacaatcaccgttttgccgcggcgaatttgacctgcatccagaccttcgctctcaatggctttgataatcccggtatgacccgtgccgcttatcatgacccggctaccggtagtgattgcgttacggttacgatcgtatgtcatcatggtgttttctcctttcaaacttacagccaaagcccgcaggtttccccgcatgacgggcgacatataaatacgcttatcgttgcgaattttttttgtttttgatcaagctcacggctttttaggcgggaatgtgcagggtgagaaagcggagaaggcgtctcaccccgacgttaaagggggttactcttcgctaaaccagccgctgttttcctgacggataagctgaacggattcgctaatttcctgcaaatgctgggtcattgcgctctcaaccgcattgccgtcacgattttccagcgcggagaaaatatcatggtgctggcgcaacaacatctccggcggagaaacatgatccagactcatatagcgaacccggtcgattgtcgctttgatattttcaatggtatcccacgctaactggcaatcggcgatctgcgccagcttttggtggaaatcgtcatcaagctggaaaaaatcatcaatctgtttgcgctcgatagcaatatgttgcaggtgcaggttttgcgccagttgatagcactggttgtcggtgatcatcgccgccgcacggcggaccaccgcgcattcgatcgcctgccgaacaaagcagccattctgtacctgagaaagcgaaatcttattcacataactaccgcgctgagggcggatctgaatcaacccattttccgccagctttataaaagcctcgcgcaccggttgacgcgaaacgttaaaacgggttgagacctctttttctgatagcggcgtgccaggcgggataagacaatgcacgatatcacgccgaagaatacggtaaatttgctggttgacaggctgtgtagggttaagctgcgtttcgacggtcattcattcttactttttaggcggttgacccggatactctaccacttttccgtggtggtctataccgatcatgtttctggttgcagatacgtttgccagggattacccggcccgcagaccgggtataaccccttagctacggtggacgctgagccctgcgaaggattgggtaacaggcatcatttcaacggtattaatattcacatgcgcggggagcgtggccacccaccataccgcttcggtaatgtcttctggcgtgagcgcggtggtattttcgtaagttttacccgctttctcatcgtcgcctttgaaacggacgctggaaaactcggtaccgccaaccagacccggttcaatgtcggtcacgcgaaccgccgtgccgtgtaaatccgtgcgcaaattcaggctaaactggcgcacaaaggctttcgtcgcgccatagacgttgccaccagcataaggccaactgccggcggttgaaccgatgttaatgatatgaccgcgattacgttcgaccattcctggcagcacggcgcgggtcatataaattaagcctttattattagtatcgatcatagtttcccagtcttctacgctggctttatgcgccggttcaagacccagcgccagaccggcgttattgaccagcacatcaatatcgcgccactgcgcaggcagagaggccatcatctcttcgatggccgcgcggttgcgcacgtccagttgggcggtcaatacgttctcgccaagctcatcttttaacgcttgcaggcgttcatgacgacgtcccgtggcaatgactttatgtccattctcaacaaaacggcgtgcaatgcactcgccaaaccctgcggttgctccagttactaaaacgatcatcacacagttcctcaacgctttttgtgttgtattaccatagcacgcggcgtttatgaaagggtaatcctggttaacacggttgcggtcagcatagggggaagcttactcttatgatcaacctattttcaggagtgaaaaatgtcgacgaatcctttgttagaccagagtatgttgccttatcaggcaccgcgttttgatcggatcaaagattgccattatcgtcctgcttttgatgagggcgtgcggcaaaaacgcgtggaaatcgaggccatcgtcaatcatccggcggcccctgactttacgaatacgcttctggcgctggagcaaagtggggcgcttctgtcacgcgtcaccagcgtttttttcgcgatgacggccgcgcacactaacgatgaactccagcggttggatgaggccttttctgccgagctggcggcgctctccaacgatatttatctgaatagcgcgttattcgctcgcgtggatgccgtctggcaacagcgtcactcactggggctggatgatgagtcgctacggttggtcgatgtgatccatcagcgttttgtgttggcaggcgcgcagcttgccgaagaggataaagcgcgactgaaggtattgaatactgaatccgcgaccttaatgagtcagtttaatcagcgtctgctggcggcaagtaaagcgggcgggctggcggtagatgacgcgcattgcctggcaggattaagcccggaagaaatgaccgtcgctgctgaagcggcgcgtgaaaaaggcctggaggagcgctggttcattccgctccttaatacgacgcaacagcctgcgcttgctacgctgcgcgatcgccagacccgcgaaaatttattcgcagcgtcatggactcgggcggaaaaaggagatgcccacgatacccgcgctatcgttcagcgtctggtagagattcgtcgctgtcaggcaaaactactgggtttccccaattatgccgcatggaaaatggccgatcagatggcgaaaacgccgcaagccgcactgagctttatgcgtggcattgtgccgccagcgcgtcagcgggtactcaatgaacaggcggaaattcagaacgtcattgatggtgagcagggcggctacaccgttcaggcctgggactggatgttctatgccgaacaggtacggcgggaaaaatatgcgttagatgaagcgcaactgaagccctattttgccttaaatacggtgttgcaagagggggttttctggaccgccaaccagctattcggcatcaccttcgtcgagcgttttgacattccggtgtatcaccctgatgttcgggtgtgggagattttcgattccgatggtgtcggcatggcgttattttatggcgacttcttcgcgcgggactcgaaaagcggcggcgcgtggatggggaattttgtcgagcaatccacactcaatgaaacccggcccgttatatacaacgtatgtaactatcagaaacctgttgatgggcagcctgcattactgctttgggacgacgttattacactcttccatgagtttggtcatacgttgcatggtttgtttgccgtccagcgttatgccacgctttcaggtaccaatacgccccgcgactttgtcgagtttccctcccagattaatgagcattgggcgagccatccacgtgtgttcgaacgctacgcgcgtcatgtcgacagcggtgaaaaaatgcctgctgatttacaggaaagaatgcgcaaggcgagtttatttaataaaggttacgatatgactgaattgctcggcgccgcattgctggatatgcgctggcatatgctggaggagagcgtagcagagcagtctgtcgctgagttcgagcagcaggcgctggccgccgagcatcttgatttaccggcagtgccgccccgctatcgcagcagttattttgcccatatcttcggcggcggctatgcagcgggatactacgcctatctgtggacgcaaatgttagcggatgacggttatcaatggtttgtagagcagggcggcctgacgcgtgaaaacgggcagcgttttcgtgatgctatccttgcccgggggaatagtactgatttagaaacgctttattcagcctggcgtggacatgaaccgcatattgaccccatgttgcaatatcgtgggctcgatcgctaagctgatacggttgttcggcactgtcgaacaaccgcctgaaaatgaatcctgaacttctgatgacagccagttaaatttatggggttaagttgtctgaatataaagagggcgtgcattcggatttttctacttatttttccgtggtggcttgattgccaaagatttattaccgcttcgctgttgatgttttcaaaaaatatatcttccgccatgtgatggtattatgtaaataatgcagaaatgaatttgacactgcgcacagggcgactagatttagaactgtatcacatgatatgagaagacatatcatatttaaaacgcaacatcatcatgaggattatattatggcagaacatcgcggcggttccggtaattttgcagaagataaagagaaagcctcagaagcaggtcgtaaaggcggccagcatagcggtgggaactttaaaaacgacccacaacgtgcatctgaagcgggtaaaaaaggtggccaaaatagccacagtggtggacggaaatccggcaattaattttactgctgatatttcataaatatattctgaaatattgcacatacgatgcgggccataggctcgcatttttttattctgaccgggagttattctgaccggtcagatgaaattattgtttatgctttcttcgttaacagaaaaagcaattcagcgagggcgaagcgtacgcatttttccaatacttcctgacaatctccgttgaaatgttgtcggcttgtaaaagttgtattgttaatattccaggcaaaccaaactgtgcccgccggcgtgccatcttcgccgccttccggaccgccatagccgctgatcgctatgctgatattgacctcagcctgatccttagcgccctgtgccatttcagtaacaaccgcttcgctgacggcggtatgttcggcaagactgtggcgttgtacgcgtaagatttttgctttggcttcatcagtaaaggtgacataccccacaccgtaaaatgagggcgtatcttctgctgcgcacaatgctgaagccagtttcccgccagtgcaggattctgcagtggtcagacggagtttctggttaaccagtaaatcaccaagtttttttgtcaggctatcgacggattcggcttcatcaagggtgacaatatcgtgctgttctaatctcatcgtttatttttccgttacagagacaaatgaaatctgttcgttcttctcaagtatggcatatttattttatgacattgtcagtgaatgattattttatccagttaccaacaaacccgctgttgcataacttgcttactttcttacggcgatgactgtcattgattatgtggaaggccattatcctcaaaaaataaagccgattattctgaattgctatccagacgttgatgcatatgacttcagctatgtggcaagttaactattacgccgttacgctttcgcgctcactggcgctgatatcggttgcatattaatccggatgggttgattttattgcttaatattctgcgggtaaattcatgtttgtaaaaactaaaaatagcggccagacttaatacgtcaaatagacgttattaaggagagagcatgaaactacaggtggctgcatttttaagttttctgataatgccttacgcgctagcggatgatcaagggggattaaaaaaagacgtggcaccgccgccgcctcatgctattgaggatggttatcgcggtacggatgatgcagaaaaaatgaccatcgaacaggcaaaaaccctgcatgatggcgcgaccgtttcgctgcgcggcaaccttattgatcataaaggcgacgatcgctatgtatttcgtgataaatccggcgagattaacgtgataattccttccgccgtatttgatgggcgggaagttcagccggatcaaatgatcaacattaacggtagcctggacaagaaagcgaaggaaccgcttgttcgcgtgaaccgactgcaaaaataacgcgcgctaaccggcaatctccaggtcagccatacggggcacgcggctggcctgataccatgggtcttgtaaaagcgcctgggggacaaaaggtcccataatgtcttattcaggtctggttgcgtatcgtttaagcttcattgatattgacggtgctacagtcgttagcgatccgttatcctcgcaagaatttgcccggtagcgtataagcaaaacacaaatctatccatgcaagcatttaccgctggtgaaccggcggttttttttttgcctgccatccagacaaaagcggccccttgcgcaacgatgcagcaaggggccggctctgcgagggattatctccgttcattaatcatcccatttgtgactgaaccaggcggccagaaatccggaaaataaaataattcctaatacaacgataaaaaggttaatactgcctaacatctcgtttctccttattttagtgtgcatcctcttttttaaaaaacctcgtacagactatagtactaatttatacttaagcaaagtctgaattgcgtatttattttactggaagggtaaagcattagaatattttcgtcagcgcccaggaatattcctgaattaccgcagtgacagcagataattagcctgcaatatatagggttaacccggtgcgccagaaactgcgcacatcactggctgcagataattaacaggtaatagcctgttgcgtaggggtaatccgcattccttttaacatcagtgcccaggcgaacacaatggcgattatcaggacaacgaaaagcgaccaggctggaagcgtcgtcaggatgacgccgctggccagcgggtttaccgccgcacccagccagcccagcgattgcgctgaaaaatagctggctttcatcccggcaggcgcaatgttgtcaattaacatatattcgccgggggcataaataatttcgccaatcgtgaatactgccgctgaaagcccccaaaaaaacagattgtcgcctgaaaaaataaatccgatgagcccggcgataaaaaagacggtgccggtcgtcatcattggtcgaatattgacggcggtaagtcgacggcccacggcgtattgcaaactgaccacaataaccgcattaaccggcaggacgacggctaccactttttccgcgaagccgctatcggcaacgaccataacgtactgtgaaatacaggacgcaaaggcgccccccacaaaggaggccagaaatgccgaaagcgtaaaccacaataatgctttgtcgcgcagcagaacggagggagaccagatagcggcatttttcccctcgctggcggcaaccgatcgtgtcacccatacctgaataaagaccagcgggaatgcggagcagatggcggcaagccagaagggtaaattgatgctttgcatcaccagcagcgtgccgagcggcgggccaaccgtccagccgatattgagtacggtatagttgagcgaaaaaatccgtgtttttgttgtcgcggtgagattatcggcgaaccaggccttcaggacggtagaaaaaaccgaataggcgcagttaataagcgcaaaaagcaggacaaccagtacgacattatgcaccattgggatggcgataaatccgcaggcgaaggcgataatcgcgagtaacatgtagcgctttttatcaaacttgtccgccagaatcccaaagccaagactaaagatgacgccgatcgttaacgcgctggtcagcgcgtagccaatcagatccacgcctaaaccgtactgacggttaagatagatggtcataaaggggagcgtggcgccgcgtccaattgtcaataacagcgatgaggcgagtagagccaacgtcgaacgtctcaatcctggattcatttttcctgcctgaaatggaggttacgtatcgggacgttttaatctaccgtgcccgcaaaagcatgatgtctatacgctatagcgtagtcttaacataccataacgcaggattttgcccatcgtgtgttgttcaatgccatgctcacggtaaaaagaaaagtcctgttatggcgcactgatttccgataacttacctttttacaaaattttaataatgacaggggccgatgatgtcgcgtaaagacggttttttggcgttactggtggttgtcgtatgggggctcaattttgttgtcatcaaagtaggcctgcaccatatgccgccattattgctggcaggattacgatttttactggtggcgtttccggcaattttctttgtcgcccggcctaaagtcccgcttacgctgttgctgggctatgggctgacgataagctttgggcagttcgcctttctcttttgcgcgataaagtttggtatgcccgcaggactggcgtcgttggtattacaggcgcaggccttttttaccatggcattgggggcgtttgtttttagcgagcggttacaacgtaagcagttggcggggatcgccctggcgattataggtgtactggtattgattgaagccagtctcaacggacagcatatagcgatgtcgggatttatgctgactctggcggcggcatttagctgggcctgcggcaatatctttaataaaaaaattatgcaacatagtccgcgcccggcggtgatgtcgctggtggtctggagcgcgctgatcccgatcctgccgttcctgctgtcatcgctgctactggagggggcggatcacattacgcaaagccttattaccatcgatatgacgacgatattgtcgctgctttatctggcttttgtcgccactatacttggctacggcatctggggcgcgttactggggcgctatgagacctggcgcgtggcgccgttatcattgctggtgccggtagtcgggctggcgagcgccgcggtgttactcggggaaacgttgaccgggatgcagcttgcgggcgcagtactgattatggctggactctatatcaatgtgtttggatttcgtgtgcgccgtactgcgcgtgtcagcggatgaggcattatgttactaagaagacaaacgctaatttcagaccatgccgcggggtaatagcggcggacttgtcatagccagacggtactaaaaaaatgccccgcaaaacggggcaaagaggttaaaggtgttggtcgttataatagggcacgcctaattcatctgacttatcgctgttcacgctcacggggtgaaggtcatttggcggatcgcctacacagggcagcagcatcacatcgcggctattttgcgccacaggtaacaaagtttgttctgcaatgccatatccggaggcgataagtaacagacccggcagggcgggaaacagcattttcatggtgctcttcgcgtggcgcataaacaaactagtagttgccatggttcagcggcagcatataccgtgattcgccatgcatattggtgatccggtatttgtgtggcggcacatcaaaatagtttttgaacgtccgggtcaatgtttgctgtgactcaaagccatagcgttccgccagatagagaatgggctcgttgctctcttttaatttttgcgcgatttccgtcattttacggctgcggatgtattggcctaatgaatgaccggtctcttttttaaacatccgttgcaggtgccatttggaatatcctgaacgctcagacactttttccagtgagagcggcgactccaggttatcctcgatccagtccaaaatgctatgaatagtaatagcgtcagtgttgcgtctggacatcgtcatacctcttttttgtctacggcagaattttcttgagcaaatactcaagcgttgccacttcgtccgccgttaagttttttgttaattcctgatgcaggtcttgccctggtcgttgatgacattgctcacaaattgccgcgccgtccggcgttagcttcaccagtacgccgcgtttgtcattaggattcggcagtctttcgatccagcctttgcacagcaggcggtcgagcatccgcgtcaatgcgccgagatcgacagacagcacttttttaagttcaaccggggtaatacatcccgcgcagcgtatcgagcaaagcactttaaactgtgttgcggtgatatccagcggggataaatagttatttaacaggcgatcttttttctgatttaccatgtagatcaagcgacccagcggaatgatttcattgaacagatcactggtgcttttcaaaatggttgccccggcaagtaattaatttcgtcagatactattgcccaggcaagtataagtcaactaaatgaattggccgatgccacgatttgctaaaaggcgtccggggtattgtgctgtgataacttgtaactaattgataattacaggttataggttgtagaggatattaacttgcacactggcgaaatggcgcgcctgggcaatttcactttatacttccggttcatgaaacgctgatgggtaagagatagtattatgatggatttgtttaaagcgattggattggggctggtcgtactgctcccgttagccaatccgctaaccaccgtggcgctgtttcttggccttgcgggcaatatgaatagtgcggaacgcaaccggcagtcctatatggcttcggtttatgtcttcgctattatgatggtggcgtactacgccgggcagttagtcatgaacaccttcggtatttcgattccagggctacggatcgccggggggttaatcgtggcgtttatcggcttcagaatgcttttcccgcagcagaaggcgcatgagtcgccggaagcgaaaagcaaatcggaggagctggcagacgaaccgacggccaatattgcgtttgttccactggctatgccaagcaccgcaggaccggggaccatcgcaatgatcatcagttccgcttccacggtgcgtcatggcggcgagtttcccgactgggtcattatggtcgcgccgccgattatttttcttgccgtggcggtgatcctgtggggatgcttacgcagttctggcgctattatgcggctggtgggtaaaggggggattgaagcgatctcccgcttaatgggattcctgctggtgtgtatgggcgtgcaatttattatcaacggcgtgttggaaattattaaaacgtaccactaaggcgcattttcgtctgccggaaacctgttcccggcagacgaatgtcttaatgcggttgttcttccagcgtcactggccatttgcggaatatgagcacagcccataccagcgcggcacaggcgggtatggcgccaatatagccgatggccgacattgaccagtgcaaactcacctgattacctaccagcgcgccagcgccaataccaatattaaagatgcctgaaaatagcgccattgcgacatcggtcgcgtccggggccagcgccagtactttcacctgcataccgagccctatcaccataatcgcgatgccccagaaaatgctcagtatggccagatgcgcttcgctctccgccgcgggcagcagcagcagcagacagacaaccagcagggcaatagcgatactgacgagcgacgaggcatggcgattacccagtttaccaaacacgaggctgccgatgatcccggcgccgccgaggatcagtaacaggacggtagcaaaattcgcactgagcccggcgacattctgaacgaacggttcaatatagctataagctgtgtaatgcgcagtcaccacaacgacggtcagtacatagaggctcatcagcgccgggcgtcggaatagcaaaggtaaactttttagtgagccggaatgctcgctcggcaatttcggtagaagcttaatcagacatagcagcgtaattaatgcgcccatgccgatggcaaaaaaggtggtgcgccagccaaaatactgaccaacaacgcgacctatgggcagcccaagcaccatggccaacgcggtgccggtcgctatcagacttaatgcctgcgcgcgtttcccggcaggggccaggcggatcgccagcgaggcggttatcgaccagaaaatagcgtgggcgaaagcgataccaatacggctaatgaccagcacggtaaagttccatgccagaaaggagagcacatggctggcaataaacaaaacaaacagataaatgagtagcttacggcgctccatttgactggtaagaagcataaaaggcagcgacatgacggcaactacccaggcgtaaatggttagcatgatgccgacctgcgcggtttgcatatgaaagctttcagcaatgtctgatagcaaaccaactggcacaaattctgtggtattgaaaataaaagcggcaatagcaagcgtaactacccgtagccacgcgaccttgcgggaaactggattgattgtcataaaaatatttcgggttagttgcgagaaggtgagaccgcgatcttaaaacgtttactggcgaaaagacaatcattttgtgacctgcttctcatttacttcgcaggccgtttcgtcttcagtcggtgctcgccagttgggcgttaagtaactcgataaaggcctcaagctgacgcgtcatcgccccgcgccgccacattagccatgtgttaagccagcgccacttctccgccaacggccaggcttccacctgatgatgtcctggcatactgttgagcatacttgctggcatcagcgcaatacctgcgccggcaattacgcacgccaacattccatgatatgactccatttcgtgaatcgtaccgggggtcgcgccatcggcatgaaaccagctttcgaaatgccgtcggtaagaacagttggcgcgaaaagcatagatgttataaccattcacctcgctggcccgcgaaacgacggaatggccgtgtggcgcgacgatcatcatctcttcctggtaagccggtataccttccagccccggatgcattagcgggccatcaataaaggcggcgttcagctttccctcgagcacgccatccagcatggcgccggaaggaccggtcgttaacgcgaactgaattttagggtaacgctggttataacccgccagcagcgcggggatacgtacggcggcagtactttctaacgcgccgagtgaaaacagtccttgcggttcctctccggcaaccaccatgcgggcttcatcgaccagcgccaggatctgctggctgtaacgtaaaaagttatgcccggctggtgacagcctgagtcgctggttttcgcgaataaacagagagacgcccaggtcggcttcaagctgacggatacgcgtggtcaggttggacggaacgcggtgcacttttgccgccgcctgcgtaatgctgcccgtcagagcgacagcgttaaacatttccagttgcgtcaggtccatggttttctcaattcgtgaatagtctggttaatattattcatttttcagaaagggtaaagggcgtcatgatggtacaactcccctgataacgagagaaagaacatgaccatgatgactgcaacacaggcgttatccgtgaatcctgcgaccggccagacgctggcggcaatgccctgggctaacgcgcaagagattgaacatgcgctgagtctggcggcgagcggtttcaaaaagtggaaaatgacatcggtagcgcaacgggcgcaaacattacgcgatattggtcaggcgcttcgcgctcatgcagaagagatggcgcaatgtattacgcgtgaaatgggtaaacccataaagcaggcgcgtgcggaagtgacgaaatccgccgcgttatgcgactggtatgcggaacatggcccggcaatgctgaatcctgagcctacgttggtagaaaatcagcaggcggtgattgaataccgtccgctgggcgtcattctggcgataatgccgtggaattttcctttatggcaggtgttacgcggggcagtgccgatactgctggcggggaatagctacttgttaaaacatgcgcccaatgtcacgggttgcgcgcagatgatagcccgaatcttggcggaagccggtactcccgctggcgtctatggatgggtgaacgctaataatgagggcgtgagtcagatgattaacgatccgcgaatcgcggcggtgacggtgaccggtagcgtgcgcgccggcgcggcgattggcgctcaggctggggcggcgctgaaaaagtgcgtactggaactgggtggctcggatccgtttattgtactcaatgatgccgatctcgagttggcggtaaaagctgcggttgccggacgctatcaaaacaccggacaagtctgcgccgccgccaaacgttttattgtcgaagagggcattgcgcaggcgtttaccgatcgttttgtggcggctgccgcagcattaaagatgggtgatcctctggttgaagagaatgacctggggccgatggcgcgctttgatttgcgtgatgaactccatcaacaggtgcaggcttccgtcgccgaaggcgcacggctactgttgggcggggagaaaatcgccggggagggcaactattatgccgcgaccgttctggcggatgttacacctgacatgacggcatttcgtcaggaactttttgggcctgttgccgccattaccgtcgcaaaagatgcggcgcacgccctcgcgctggcgaatgacagtgagtttggcctgtcggcgacgatctttaccgccgacgatacgctggccgcggagatggcggcgcgtcttgagtgcggtggggtattcattaatggttacagcgccagcgatgcgcgtgtggcattcggcggggtgaagaaaagcggcttcggtcgcgagctttcgcactttggtttacacgaattttgtaatgtgcagaccgtctggaagaaccgcgtctaatcgccctgacgtcgcgtggcgccctctgctatactcgcaggccttttcagacctgcgagcaaggagcatgttgtggccagggccatggataatgcaattttagagacgattttacagcgcgttcgccccctcattggccagggcaaagtcgctgactatattccggcattagcgtccgtcgaaggttcaaagctggggatagcgatttgtaccgtggacgggcagcattatcaggcgggcgatgcgcacgaacgcttctctattcagtctatttcgaaagtgctcagtctggtggtggcgatgcgtcattatccggaagaggagatctggcagcgcgtcggaaaagatccttccggctcgccgttcaattcgttggttcagttagagatggaacaaggcatcccgcgtaatccatttattaatgcgggcgcgctggtggtatgcgacatgttgcaaggccggcttagcgcgccgcgtcagcggatgctggaagttgtgcgcgcgctttgcggcgtatcggatattacgtatgacgctacggtcgcgcgctctgaatttgagcattccgcccgtaacgccgctattgcctggctgatgaaatcattcggtaattttcatcatgatgtgcctaccgtgttgcaaaattactttcactactgtgcgttgaaaatgagctgcatggaactggcgaggacgtttgtctttctggcgaatcagggcgaggcgtttcatctcgacgagccggtagtgacccccatgcaggcccggcagattaatgcgctaatggcgaccagcgggatgtatcagaatgccggcgagtttgcctggcgggtgggattgcccgctaaatccggcgtgggcggcggtattgtcgccatagtgccgcatgaaatggcgattgccgtctggagtccggagctggatcctgcgggaaactctctggcaggtatcgccgcgcttgagcaattaacacaaacgttaggacgttcggtatactgatgaatgcgcttgaaccgctctttgcccgcctggcgcgatcgacatttcgttcgcgttttcgtctcgggataaaagaaagacaatattgctgggataaaggcgcggaggtgattgataaacacgccgccgattttatcgcccagcgactggcgccagctcacccggcgaatgatggtaagcaaacgccgatgcggggccatccggtatttatcgcgcaacatgcgacggcaacctgctgtcgcgggtgcctggcgaagtggcaccagatacctcagggagaaccgctgagcgaagcgcagcaacagtatattgtcagcgttatccattactggctggtcatacaaatgaatcagcggtagagcagcgcgtcgttgctgacgctttccctgataaattaccctcataccactgatagcagccgttgaccgtcatatatctcatgcgctgaagcgcatatttagttacaacatacagttagttgttttttttcaacgcctgtcagcactgtgcaaaaaaatgttctacagggcagggaacccgtgtatcaccagaagcttgcaaccttgatctggatcacgtttaatgacagtgctttttcaccagctgaagataatcatgatcgttagaccacaacagcactggattcgcctgatatttgtctggcatggttccgtgttatctaaaatcttttcacgactactccttaactttcttctttctatcgccgttattatcatgctgccctggtacacaatgctgggtattaagtttacccttgcgccgtttagcatactgggcgtcgctatcgccatttttcttgggtttcgcaataatgcctgttatgcgcgttacgtcgaagcccgacatttgtgggggcagttgatgatcgcttcacgctcaatactgcgagaggtgaaaacaaccttgcctgatgaacgcggtatcgaggattttgttcggttacaaatcgcttttgcccactgtttgcgtatgacattgcgtcgacagcctcaaacgcaagttctgggaaactatcttgaccaggaggcgttacagaaagttgtcgcttcccattcccccgctaaccgtatcttattgctgatgggagagtggctggcgattcgccgccgcagcggaaagctttccgatattttatttcatagcctcaacaaccgcttaaatgatatgtcgtcagtattggccggctgtgagcgcatcgccaacacgccggtgccttttgcctatacgttaattttgcatcgtacggtttatcttttctgcattatgttgccatttgcactggtggttgatctgcactatatgacgccgtttatttcggtgctgatttcttatacgtttatcgcgctggatgcgttagcagaagagttggaagatccgttcggtactgaaaataatgatttaccgctggatgcgatatgcaatgcgatagaaatcgatttactgcaaatgaatgatgaaagggatattccggcaaaacggataccggataaacgctatcaactgacctgagctcgacttaactggcgcagaatgttcatctgcgccataacctgaatagcaaagtttaatagccttctccaacgccggttttggctggaccggagtagtggacatgaacgattcgccatcctgtgtttggtatcttcgcccacacctggctttcgcggcctgtcgtgtgttgagtctgcccattatcacggcgtaccgcggtaaaatgccagtcgaactctgcaacggcggcattgccatacacatgaatagcagggggagcgtccagttttaatgtgcgtttgctgaaggttttacccatagtggtgccataaaaattttcagcgatctgcgaccatccgcgttcgtgaccgcgtggatgaataaaactggtttccggtgaaacataaaagagctgcttgcctaacgttgggtctgccttatctattgaataaaggtaacggttaatgccttctgtaatttcttgtttaacggtcgacgtagcttcattttgtgcggcggttggcgttgccgctgatgccgatgacgccatcagagttaacgttatcgcggcggccgaaaacaatagtgacgttttttgcataatagttatacccatatggtctgtttttgagacgctttatctttcctgttacgttcacctttatactaaaggagcatggctcacgaacaataaaaaacatccttctataaaactaccccgaaaagggagtagtgcaattaagaatatcgtatttgtttgtaacggcatgactcaaaatatcaacatttagagtttcagtattgttgttgtccattgacttacttttatttttattaccactggtaaatagttaatcttatgaatagtgatacacaaatgaccgtttgcgctatgtgataattaaccatagtaaaaatacacgaagcgaagaagtgctatttcagtagtactgatattttcataacgctaatttaaaaataaatgtaaacgtaacaaattatacacaaaaataagaagggctgtggcctcaactgactggattatgattccgtcttaccgaatgtcagccgaatgttcagtgccattctcgccctggcatccccgaccgtaagcctgttctctactggtaacccccttgttattacagcagaaaacagggcatatcattgatgtagtcatgcttaacttgcattttaacatcactaatacatagcaagctaatattacactttgaaacttaacgcacggtaattgttagtgatattgtcctggacagttccgcgagcaggctttgcggaaagtccaaaaataagacaaataaggcatataaaatgaaaaaagtagtggtgttatctgcggtagccgcagccgtaatgatggctggagccgccaacgcagcagaaatctataacaaggatggcaataaactggatttgtatggcaaggtcgacggcctgcattatttttccagtaatcatagtacggatggcgatcaatcttatatccgtatgggtattaaaggcgagactcaaattaccgatcaactaaccggttttggacagtgggagtatcaggtcaacgccaatcgtccggaagatggtgactccagcggttccccgcaaagctggacgcgtctcggttttgctggtttggcatttgccgatatggggtctgttgattatggtcgtaactatggcgtgttatacgacattggttcatggactgacgtactgcctgaatttggtaatgattcgtatgaagcttccgataattttatgaccggacgcgcgaatggcgttctgacttatcgcaataatgatttctttggtctggttgatggtctgaatattgcgttgcagtatcagggtaaaaatgacggcctgtcgaaagaaggcgatcctttaagtaataatgccagaaaaagtatcgcgtaccagaatggcgatggtttcggggcatcagcgacatatgatttgggcatgggggtgagcctgggggcagcctataccagttccaaacgcacgcttgatcagatgacgcaagataaatacgacaatggcgaccgcgctgaagcctggactggcggcgtgaagtatgatgccaataatatttacctggcggcaaactatacccgtacttatgatatgacctatatgggcgatacattgggcggctttgcacataaaaccgataactgggaaatggtagggcaatatcaatttgataatggcttacgcccgtcactggcgttcctgcaatccagagccaatgatgttgatggactgggttcgttcgaccttgtgaaatatattgatgtgggttcctactactacttcaataaaaatatgtccgcgtatgttgactacaaaatcaatctgctaaaagatggcaacccatcgaatcctaatacagacaacaccgtggcgctcggcttagtctacgagttttgataaaacttgctgattaagacagtttagggataccctccttttcccaaaactgtgtcactgcttaacctttattattgttaatttattcttttattatttcaggacgcttctggcgtccttttttattgactattcgttgactattcgacttcgatctcgcgaatgcgcattctgctactgtcatctatctgcactttgcctgaatgacaaaggggacaacagagtgtggatgtttgagaggtgaagggttgattacaggacagacaccaaccttgcgccggtgcgatagtaatgtggaaacgcgcattgtcagcaagggtatgacgagcggcgacgtccaggccaaaatgcagcgccggcacctcaacacaggccataacgccaatctccagccagacttgctttaccttgctgaactggtgatttactgcctgttcctccagcaattcgataatattttgcgccagggctaattcatgcatgggccagctccttcattcaacaatatttacggcgacacaaggatcaattacctgtaactgttgcgaccacaatgagagtggaatagtggccagttcgcgagcaatgacgccgtcaggttgggcgtgacgtgtggtaggcgagataatacggtaatcaagaatattgcctgacgtcgtcagtctggcctgatgaactaaccatcctcgcgcggtttccactaccgctattttccattcgccatcatcaaaacgattccagcgcagggtgggaagggcgctcaaacttcgggcgagcgtaatgcagcgggccagcagacgtagcgcagtcgttttaccgctaagacaacaggctgacagcagcggatattcgatagccagaggcgagacatccaggggaccatgggttattaacgtatggtccggggacgatgccatcggtagtgtaggtgtaatgatattctgtactgccgccagccagcgggcggtttcagaacgctcttgcaaaaaccaggcttcccagccctttacgccagcggcaagccaggtctgaggatcatcgtcaaaaaagattgtgcttgccagcggggataactctccgcgacgtaacaacgcccattcttcagcggttgcctgtcggtggctaaacagggggagccagtctgtcaacgcgcgacggagcgtttctcgcgccagctcttgttgtgcggcctgcatatctggcttcttttcaggaaacaacagtaaagccgccgccgcgctgtgcgcctgagcgcacaacgtaaacaaacgtgaaataagcgtttttgcgtataccggcgttgcgccctgtaacaaacgaccgatcggcgcctcctgccagataatccgtagcgggtgagaatagacggtcaatctttgcacgaactattaccttcatcgatcaccataaacccggacttactggtttcgcaaaccggacagcaccagtaatcaggtaactggttgaagggcacgccgggtggaatttgccatacatcatcgcccagcgcagggtcgtaaacccaccaacatactttgcactccatgcgcaccactggctcattttctgtgaccgggtattctttcaaccattccaacgtattttttagccccgcgtaggcatcttcaatatcgtcgatgcctgcaacggcgatatcaggaatgtccgctatctcaatcatatcttgcagtaatgtattcatatcattgaaatagttgacccgccatacgccgggaaaatgcgtgcttacaatccggcatttaccatatccgcgtgaaaaaatagcgctacagccttcgcctaaaaaatgatccagatactcgcgatcggcatcgtttactggcaacagcgttaagttaatgatatgtggctcttttaccggctgttttacgcgctcggctatttcatgcgcgataaaggcgccattcatcaatcccgccggttgtggcggcaattctggcgtaatcggcggctgcggatgcgtctgccagatgctctctgggatcgggccaatgataatttcatcggcaacccgttgctggtcagcgttatattcacgcacacgccagacgcccgtaaaaaccgtctcctgaatacgctgttcttttccatcggataatagtacccgggcggagatttcaccttcgccgagcagttgatccaataaaccgctattctgttgctcagtggcattcagcttatagctcaggggaaaggggagcgttgccaccgggttatccatatcgcgaataagcgtagtcaggatgtgtctggcaacacggagctcagcgggcagcgcctgttccggtaaaaccggcgtcagcgggagattaatgccggcggggatgggaagaaagttaaagtcttcctcttctggctgcgatcctggtccggcaatattaacgactggaatagttctggaatgattcacgtgtgttacctttcattctattgcgtgataacgggaatatcctgacgatagcccggtgtggtcagcaatgcggccacccgctgagagtattcttgccagctatataatcccgccagactgccgacaaaacggtgctggcgaaagaaaagcagcgccggatatttcagaatgcgatactcccgggcgatcagttcactctgttcgctatccgcaaatgccgcggtataagacgtcgccggaaattgcttgaggatctccgggatgatgacccaactgtcggcgacttccggatgtttgttggggtcgctttgcagcaaaaccagcagagtcggatgcgcattaatcaacgacgggagcgtttgcgcatcggtaaccagaaagcctttatccgccagtggacaaacaggattttggggtgagatagtcatttttttaaatgctccggtaattcaggcgtgcgagacaataaatcggcaaaaccggtcagcggatcgctttgcgtgagcatggcctgttccagtgagtccagcgccgccagtacctcagcggcttccgcttcgtccatttctcgtcgtgctgcgccgccaaatgtcagcagccatgcgcctgctaaggggggagccacaagccgaatatcaacgtcgataagctcgccgtgtcggtcgcggcatttggcgaaccactgaccgggtgaaataacctgcacaggaacgccaatacacattatgatttctctctctgtagcacccgaatatcgccgacccggcaagcgctttgcgcatctgggcgttcatcttcgtagcgttccatacacaggctgtaatgattgagtctttcagtgggcaaggccgctgaagaggcggtgataccccattgcgccagcacttcctgcgcgagatagaccgcaggcatcagttgcgcctttacctgcggcgtaagactcccgccatagtcatccagacattccggctgcacgccaatcagcacaatctccgataactggccgccggttaattgcagcaatgccagcacttcagaaaaactggtctgatgtaaactgagttttttcgccgtcagataggcgggaacctgttcatcacgaaacatcgccagcgaacctggcgccataccaaaatcgatagcatccatgattaacagtttttcggtctgttgcagccagggcagcagcgccagcccctgcgtaccgccatcaacaacgtcaactttctcgttatcggcatactgttcaaacagcttttccgccgctctgacgccgaacccttcatctgcccaaagcaggttgccaagccctaagattgttacttctgccattgttatcacctgaaccagcgccagccgcttatcatgacggaaatcacgctttgtcggctcataatgtcttcgcggatagcggtataaacatgcgcaatgacgaaggcgataatgaaccacatgcccagccggtgccagaaatgcagcgcgaggctatcgttgccagtcaggcgaatcatccagccaaaccattgatacgcccaactgtctgttccaagtccttcgccatagagcgcaaagccgctacacaccatcagtacggacatccagaaatagaacattaccgccagtcccgctaccggattatgtccatagtaacgatgggcctctttttcgaggaaaaaataccagcggatttcgctgataacgcctttgcgccaggcgcggcgccagaacggaaccagaaacatctccctggcgtactcattgccgacacatgcccagtaaatacgaaacagcagcgcgacagtaaaaatatacgccgtggtaaaatggatcagtcgtatccagcccatccaaaacataaaggtcgcttcaccttgaatcgatggcagggggcggccaatgaaatatcctgtaacagccaggacgacaatggataacgccgtgatccagtgccataaacggaccggcgcttcatagatatagtacccctggctggttatttctttgagatgcattgagacctccgaatcgtcgtcatcgtacctgaaccctgaccagctcccctccatgattatcaataacatgggtggagcaggccaggcagggatcgaagctgtgcagagtacgtaaaatctccaatggttgatcgggaacggcgagtttagtccccattaacgccgcttcgtacgcgccaatttgacctttatcgtcacgtggcccggcattccaggttgtcggtaccacacactgatagctgtcgattttctgatttgcaatttttatccagtgccccagcgcgccgcgcggcgcctcgctgaaaccaacgccttttgccgatgtaggccaggtatcgggttcccagagcgtgacgtttgccgtcgccgtatcgccggacttgaggttacgcatcagacgatcgaagaaatattgcagcgtattgcctgcccatacggattccagcgcacgcgcggcagtacgtcctaatgtagaaaagagcgcttctttaggcagctttaatacactcagcagttgatccacgggttctttaaattccggtttattttgatgatatccaatcagataacgcgccagcggacctacctccatcgcatgtcccttccagcgcggcgatttaatccatgaatatttagcggactcatccacctgttcgataaaggtttttgtgcctttatagtgttcgcccatgaccagttgcggttcggtcagaccatcccacggatgcaggcccttatcgttattgccgttaccataggtataccaggagtgagtgacaaactcctgaatctcatcgggggcggttaaatcgacaggatgaatttcgtcgaaacgaccgttaatgatagccccacgcggaagcagaagattactggcggaataatcgttagggttatccggaaactcgccataagccagcaggttcatgctcgataacccgccgccgatttttgcccagtctttgtaataactggcaatcagcaagacgtccggaagataaacctgttcgcagaactggcgagctttttggatgatggaactgacaaggttcaggcgttccatattcactgcgccgaccgcgcccgtttcgtcaaggttgatggcgcaaggaacgccgcccaccagccagttaggatgcgggtttttaccaccgaaaacggtgtgaatttttacgatctctttttgaaaatcgagcgcttcaagatagtgggcgaccgccagcaaattggcttccggcggaagtttcatcgccggatgtccccagtagccattacggaaagggccaagttgaccggactcgataaaccgcttcagtcgattttgcaaatcgcggaaatatcccggcgaggatagcggccatgcggaaaggctttgcgcgatggcggaggtctgatgcgggtcggctttcagggcggcaaccacatcaacccagtccagcgcgtgcagatgataaaaatgcaccaggtgatcgtgaacgtgtagcgtagcctgcatcatattacggatacagtttgcgttgtccggaatcgcgattcccagcgcattttctacggcacggattgaggtcagagcgtgtgtaccggtgcagacgccgcaaatgcgttcaacgaatgcccaggcgtctcgcggatcgcgacctttcaggataacctccaggccgcgccacatggtgccggtcgacacggcgttagtaatgacattattactgtcgatattcacttcgcagcgcatatgcccttcgatgcgagtaaccggatcgaccacaattcgccgtccgctattgtccagcgtaaaaccctgagtctgataaggatatgccataattattttttctcttccggagcgttttctgatgacgtgttgtttttattgcgggcatgttttatggcgctcaccgtggcgtgagcgatggcggcagcgcccgcgacgccagcaacgcccagtccgattttatcggcggtagcctcaatgccggtttgcggaatgcccgttgcccggctgtaaaaagaaccgtaatcccagaatccatcttccgaacatccgaggcatccatgacccgactggataggaaaagacacgccatcattccagcgaacggttgaacaggcgttataggtggtcgggcctttacagcccatcttgtacaggcaatacccttttctggcgccttcgtcatcccacgcttccacaaactgaccggcatcgaaatgcgcgcgtcggtaacatttgtcatgaattcgctggccataaaacatttttggtcgtccaagacgatcaaggggagggatgcgatcaaatgccagcatataggtgataacggcggacatcacttcaggtataggcgggcagcctggcactttaataatgggtttatcggtaattaacttgtgaaccggcgtggctttagttgggttgggacgggctgcctgcacgcagccccatgatgcgcaggacccccaggcgataatcgctttagcatccgcgctgacgcgttttaacttctccaggaacggctcgccagccagtatgcaaaacatcccatcttcattcagcggcgcgttaccttccacagcaacgatataatttcctttgtactcacgcatcacatccgccaacgcctgctcagcttgttgccctgcggcggccataatggtgtcgtcataatccagggaaatgagcgacaaaatggcatcttttgccaacgggtgcgcagagcgaatgaaagattcggtacagcaggtacattcaagaccatgcagccatatcactggcgtacgcggtttattctccagggcataagctatttgaggaatcatcgaactgctcaggcctaaagacgttgcggtaaggctgcaaaacttgaggaagctacgccttgtcacgccgtgtctacgcataacttgataaaatgtatcttgtgtttgcataacgtttatcccaaaccactatagttagtgtgggcatcatatgttgcatttcttgtctttctcaacgtgttttagtagcaattatgtttctaattcgtaacaactgattacatgtgtgctactcacattactcaaaaacataaattaatttaatgttattggtgatgttgagtaaatatagcgttgtgatggcatctcttaatgttgataagaaaccgtgttttttatttataacatgatgggatttttttaaatggtcacacggataacgcgttttcatgttagctcgctctgtttaactctcctttaaacccgtcagttaaatttattagcttgtaaaataagatcacaattaattacgtgctgcataaccattgataggtttaatttaatatattcatccaatccattttacaaacaaggagagcatgatgaaaaaaagtaaagcaatgttatttatcgctccggcgctgttttcatacgccctggcggcacaggcctgcacgacccttgctattcaggataaacaaggcgatatttttcatgggcgtacgctggaatatatgcaggatttaccctcatggttaacgtattacccggcgggaacacagtttgataaaaaaacgccggatggcagccaggggataagctatcaggcgaagtatccgatactggccattacttccaccattactgatggcgatagcagagacatacttgaaggcatgaatagcgcgggattgtcatttagtgaaaacatgatcatgaatgcgcagttgccgccattgcccgcgagtgaatataaacaggcaattcctgtcacctcgttgggagaatgggcgctggcccgttttgctactgtcggcgaggtaaaacaggcaataaaagagggcaaattctggtcaccagaactgcatcggtttggcgatctgaaatcgccatttcattacgcgttttacgacaagaaaggaggaagcattgtcgttgaagtggaaaatggtaaattccatgtctatgacaatcccactcgcgtgatgacaaatggtcccgcattcccctggcatctgacaaatctgaataattatacgcaattaaccaatgtggaccgctcttcaggcacactgggcgggataaaagtgatgcagcctgatagcgggattgctattgcagacttgccatcgtccgatacgtcggtttcccgttttatacgcggcgtttattacaccacatatgcgccgcaagcgacatccgcccacgatgcaatgaatacgcttgcgcatattatgagccgtttcgatcgtccgaaaaatattacggttgattatatggggagtgaaggggaaggcaacgccacccgcaaaccggtctcagaatatacggtctggacaacgctgtctgacttaatgcacggtgagatgatggtgcgcggctacaatgatatcaactataaaacctggtctctttctcagtttaagaacgcgacagcgcccgtgttcgagaaaatcaacgtcaaaggataaatagctcatctcggtttagtttccccggtagtctcggcgaaggtaatggagactaccggcggttgcttctctttatcatgcacggtaattaattatcacgatcaccagcgccaggatggtatgctaaatccattcaaaatcccctggatatggattggagggcgcatggttatacctgaggtcaggcaggagaggctctatcagaagatagccaacctcatcattaagctgatcaatgataatatttttccaccgggaacttttttaccgccagaacgcgaactggcaaaacagcttggcgtgagccgcgcctccttgcgagaagcccttattgtactggagatctcgggatggatcgtgattcagtccggtaatggggttatcgtttcagataaaaaacaccttgccagcgactataccatcgaagaaattctctctactcgcgagctggtcgatagccattgtgcgcgcttagccgcacaaaacgataacgttgacgtcatcaaccaaatagaggcgatttatcatcgtatggatcaagccattaacgataataacgtccacggcttttactcgctggataaagagtttcaccttgcgatctctgaggccagccgtaaccgggtgttgttcgatatgtcccgtatgttatgggaacaacggattaatatcccttatgctgggctcgacgagcagtctggagacagaaatgttttacttaatctcaacaaacaacataaagcgatagtggatgcgatgcgacagtctgatgctgacagcgcctatgagggatcgctggaacatttacgctatgtgagaaagattgtcggcggctaattttgtcgatgaataacaccgcatggcggtcatgccatgcggtggagcttgccgtaaatcaatggaaaacagcattaatctttaagtagcgctccggatagcgatcaagttctttaactgcatcagggatctcatcaagattgacgaccttactgacgacatcttgcggattaatctccagcgtagacagcatacgtaatgcctcatcaaattcaccggcactggtgcgggaaccgcgtaaatccagttctttataggtgatcaggttcgtcggcagcgacgtttcctgttttggccatccggtaaacgaaatacgaccagcaaacgatgctaaatcaagcgtatttcgaatagcgctatttgcgccggaagcttctatcacgacctgcgccatggtgccgtgggtgatatttttaatagcgtcgataacctgatcgtcagcggcgttcagcacataaggaacgccaagcttttgcgcatagcgtagcctttcttccacaatatcgatcagaataggcgttgccttgtaatgacgcgcgcttaatgccgccataagaccaatggcccccgcgccgatgatggcaacatattccccggccttaacgtttgcccgatgcaacgcgtgcagagcgatggtcagcggttctgccagcggcgccatttcagaaggcacattatctggtattttatgaattaaatgtgcgggatgagtaaccacctcctgcattgcgccatcgacatgcacgccaatgacgtttaaattttcacaacaattagttctgccgacagagaaagggtagcagtgaccacaataaatataggggtcaacaattacgcggtcaccttctttaatattgtccggcattccggcgccttcctgaagaacaattccggtcacttcatgcccaataattcttgggtaagtaaccagtgggttcgttccacgaaaagccccgatatccgatccgcaaatgcctgcagcatcaaccttaattaatacttcattttctttcttatggggataatccacccagcgggtttcaacttcaccaggcttattaatgaacacagctttgactttcattggctttgaatcctttactttttacaaacacgaagaccaacaggcttgaaacgatagcgatagcaccagccagatagaacgcatagtcatatttaccgctaaattgaacgataaaaccggtgacaagcggaccgataatgccggatatattagccaggccatgcatggctccgccgacgctccctaccttatctttatgaacaacatcctgaataaccgcccaataaattgggcccgttaaatagagcaggaagagtgaaactgacatgagcgtaattgcgctaccaatagtgctaacagtaccggaaacggcaacacataccgctgcgcctgccagacatacgcccagaataagtcgacgtgagagcagagcattaccggtaatccgataaattacatcggaacagacgccgccgagtaccataccaatggcgccgatgacccagggaattaccgtggcgatactaatttctttaatatcgagatgtaacgaatggttcaggtaacttgggaaccaggtcaggaagaaaaaaagaatatagttgtagctgaaaaaagccagagttgtcgcccataccattggttgtttcatgtaatagccgagtgaaggcgtagcccggccatcatcagataaaataacgtcctcatgattttcaaaatcaatgcgttcttccggcgccaggcgtttactcattgttggcttatcgctaacgataaagtaccacagtagtacccagaccaggccaaataagaaaataatgccaaatgcggggcgccagcctaaggataacgccaacaggcccacaatcggcc

(The sequence listing continues in the following parts.)

1. A method for evaluating the genotoxicity of a test substance, comprising:
(1) obtaining DNAs from a test group, the test group is a cell population exposed to the test substance;
(2) sequencing fragments of the DNAs to obtain one or more read sequences per fragment;
(3) comparing each of the one or more read sequences with a reference sequence to detect sites of mismatch bases between the each read sequence and the reference sequence, wherein the reference sequence is a known sequence in the DNAs;
(4) obtaining the sites detected in the step (3) as sites of mutation each having a base pair substitution mutation;
(5) classifying each of the obtained mutations according to base pair mutation patterns; and
(6) determining respective mutation frequencies of the mutation patterns obtained in the step (5).

2. The method according to claim 1, further comprising extracting, from the bases of the read sequences obtained in the step (2), bases with high reading reliability of the sequencing, wherein
the step (3) comprises comparing the extracted bases on the read sequences with the bases of the reference sequence.

3. The method according to claim 1, wherein
the steps (3) to (5) comprise:
dividing bases contained in the read sequences into the following bases (i) to (iv):
(i) a base located at a position where the base on the reference sequence is A,
(ii) a base located at a position where the base on the reference sequence is T,
(iii) a base located at a position where the base on the reference sequence is G, and
(iv) a base located at a position where the base on the reference sequence is C;
detecting mismatch bases with respect to the reference sequence from among the bases contained in the read sequences, and obtaining sites of the detected bases as sites of mutation each having a base pair substitution mutation;
obtaining base pairs before mutation and after mutation at the respective sites of mutation of the detected mismatch bases; and
classifying the base pair substitution mutations at the sites of mutation, according to the types of the base pairs before mutation and the base pairs after mutation, into 6 of base pair mutation patterns: AT→TA, AT→CG, AT→GC, GC→TA, GC→CG, and GC→AT.

4. The method according to claim 1, further comprising:
(7) conducting the same procedures as in the steps (1) to (6) on a control group, the control group is a cell population unexposed to the test substance, thereby determining respective mutation frequencies of the base pair mutation patterns in the control group; and
(8) subtracting the respective mutation frequencies of the mutation patterns in the control group obtained in the step (7) from the respective mutation frequencies of the mutation patterns in the test group obtained in the step (6).

5. A method for evaluating the genotoxicity of a test substance, comprising:
(1′) obtaining DNAs from a test group, the test group is a cell population exposed to the test substance;
(2′) sequencing fragments of the DNAs to obtain one or more read sequences per fragment;
(3′) comparing each of the one or more read sequences with a reference sequence to detect sites of mismatch bases between the each read sequence and the reference sequence, wherein the reference sequence is a known sequence in the DNAs;
(4′) obtaining the sites detected in the step (3′) as sites of mutation each having a base pair substitution mutation;
(5′) as to each of the mutations thus obtained, determining a context sequence comprising a base before mutation and adjacent upstream and downstream bases of the base before mutation, the context sequence is determined on the basis of the reference sequence;
(6′) typing each of the mutations obtained in the step (4′) according to the context sequence determined in the step (5′) and the type of the base after mutation; and
(7′) determining respective mutation frequencies of the mutation types obtained in the step (6′).

6. The method according to claim 5, further comprising extracting, from the bases of the read sequences obtained in the step (2′), bases with high reading reliability of the sequencing, wherein
the step (3′) comprises comparing the extracted bases on the read sequences with the bases of the reference sequence.

7. The method according to claim 5, wherein the steps (3′) to (6′) comprise:
dividing bases contained in the read sequences into the following bases (i) to (iv):
(i) a base located at a position where the base on the reference sequence is A,
(ii) a base located at a position where the base on the reference sequence is T,
(iii) a base located at a position where the base on the reference sequence is G, and
(iv) a base located at a position where the base on the reference sequence is C;
detecting mismatch bases with respect to the reference sequence from among the bases contained in the read sequences, and obtaining sites of the detected bases as sites of mutation each having a base pair substitution mutation;
obtaining base pairs before mutation and after mutation at the respective sites of mutation of the detected mismatch bases;
classifying the base pair substitution mutations at the sites of mutation, according to the types of the base pairs before mutation and the base pairs after mutation, into 6 of base pair mutation patterns: AT→TA, AT→CG, AT→GC, GC→TA, GC→CG, and GC→AT;
determining context sequences each consisting of a base before mutation located at each of the sites of mutation, one or more adjacent upstream bases of the base before mutation, and one or more adjacent downstream bases of the base before mutation; and
typing each of the base pair substitution mutations according to the 6 of base pair mutation patterns and the context sequences.

8. The method according to claim 5, further comprising:
(8′) conducting the same procedures as in the steps (1′) to (7′) on a control group, the control group is a cell population unexposed to the test substance, thereby determining respective mutation frequencies of the mutation types in the control group; and
(9′) subtracting the respective mutation frequencies of the mutation types in the control group obtained in the step (8′) from the respective mutation frequencies of the mutation types in the test group obtained in the step (7′).

9. A method for evaluating the genotoxicity of a test substance, comprising:
(1″) obtaining DNAs from a test group, the test group is a cell population exposed to the test substance;
(2″) sequencing fragments of the DNAs to obtain one or more read sequences per fragment;
(3″) comparing each of the one or more read sequences with a reference sequence to detect sites of base insertion or deletion in the each read sequence with respect to the reference sequence, wherein the reference sequence is a known sequence in the DNAs;
(4″) obtaining the sites detected in the step (3″) as sites of mutation each having an insertion or deletion mutation;
(5″) as to each of the mutations thus obtained, determining the base length of the insertion or deletion and/or the type of the inserted or deleted base; and
(6″) determining respective mutation frequencies for each of the sites of the insertion or deletion mutations with different base lengths of the insertion or deletion and/or different types of the inserted or deleted bases determined in the step (5″).

10. The method according to claim 9, further comprising extracting, from the bases of the read sequences obtained in the step (2″), bases with high reading reliability of the sequencing, wherein
the step (3″) comprises comparing the extracted bases on the read sequences with the bases of the reference sequence.

11. The method according to claim 9, further comprising:
(7″) conducting the same procedures as in the steps (1″) to (6″) on a control group, the control group is a cell population unexposed to the test substance, thereby determining respective mutation frequencies for each of the sites of the insertion or deletion mutations with different base lengths of the insertion or deletion and/or different types of the inserted or deleted bases in the control group; and
(8″) subtracting the respective mutation frequencies in the control group obtained in the step (7″) from the respective mutation frequencies for each of the sites of the insertion or deletion mutations with different base lengths of the insertion or deletion and/or different types of the inserted or deleted bases in the test group obtained in the step (6″).

12. A method for evaluating mutations in cancer cells, comprising:
(1) obtaining DNAs from a test group, the test group is a cancer cell population;
(2) sequencing fragments of the DNAs to obtain one or more read sequences per fragment;
(3) comparing each of the one or more read sequences with a reference sequence to detect sites of mismatch bases between the each read sequence and the reference sequence, wherein the reference sequence is a known sequence in the DNAs;
(4) obtaining the sites detected in the step (3) as sites of mutation each having a base pair substitution mutation;
(5) classifying each of the obtained mutations according to base pair mutation patterns; and
(6) determining respective mutation frequencies of the mutation patterns obtained in the step (5).

13. A method for evaluating genetic information in cultured cells, comprising:
(1) obtaining DNAs from a test group, the test group is a cultured cell population;
(2) sequencing fragments of the DNAs to obtain one or more read sequences per fragment;
(3) comparing each of the one or more read sequences with a reference sequence to detect sites of mismatch bases between the each read sequence and the reference sequence, wherein the reference sequence is a known sequence in the DNAs;
(4) obtaining the sites detected in the step (3) as sites of mutation each having a base pair substitution mutation;
(5) classifying each of the obtained mutations according to base pair mutation patterns; and
(6) determining respective mutation frequencies of the mutation patterns obtained in the step (5).

14. The method according to claim 12, further comprising extracting, from the bases of the read sequences obtained in the step (2), bases with high reading reliability of the sequencing, wherein
the step (3) comprises comparing the extracted bases on the read sequences with the bases of the reference sequence.

15. The method according to claim 13, further comprising extracting, from the bases of the read sequences obtained in the step (2), bases with high reading reliability of the sequencing, wherein
the step (3) comprises comparing the extracted bases on the read sequences with the bases of the reference sequence.

16. The method according to claim 12, wherein the steps (3) to (5) comprise:
dividing bases contained in the read sequences into the following bases (i) to (iv):
(i) a base located at a position where the base on the reference sequence is A,
(ii) a base located at a position where the base on the reference sequence is T,
(iii) a base located at a position where the base on the reference sequence is G, and
(iv) a base located at a position where the base on the reference sequence is C;
detecting mismatch bases with respect to the reference sequence from among the bases contained in the read sequences, and obtaining sites of the detected bases as sites of mutation each having a base pair substitution mutation;
obtaining base pairs before mutation and after mutation at the respective sites of mutation of the detected mismatch bases; and
classifying the base pair substitution mutations at the sites of mutation, according to the types of the base pairs before mutation and the base pairs after mutation, into 6 of base pair mutation patterns: AT→TA, AT→CG, AT→GC, GC→TA, GC→CG, and GC→AT.

17. The method according to claim 13, wherein the steps (3) to (5) comprise:
dividing bases contained in the read sequences into the following bases (i) to (iv):
(i) a base located at a position where the base on the reference sequence is A,
(ii) a base located at a position where the base on the reference sequence is T,
(iii) a base located at a position where the base on the reference sequence is G, and
(iv) a base located at a position where the base on the reference sequence is C;
detecting mismatch bases with respect to the reference sequence from among the bases contained in the read sequences, and obtaining sites of the detected bases as sites of mutation each having a base pair substitution mutation;
obtaining base pairs before mutation and after mutation at the respective sites of mutation of the detected mismatch bases; and
classifying the base pair substitution mutations at the sites of mutation, according to the types of the base pairs before mutation and the base pairs after mutation, into 6 of base pair mutation patterns: AT→TA, AT→CG, AT→GC, GC→TA, GC→CG, and GC→AT.

18. The method according to claim 12, further comprising:
(7) determining respective mutation frequencies of base pair mutation patterns in a control group by the same procedures as in the steps (1) to (6); and
(8) subtracting the respective mutation frequencies of the mutation patterns in the control group obtained in the step (7) from the respective mutation frequencies of the mutation patterns in the test group obtained in the step (6).

19. The method according to claim 13, further comprising:
(7) determining respective mutation frequencies of base pair mutation patterns in a control group by the same procedures as in the steps (1) to (6); and
(8) subtracting the respective mutation frequencies of the mutation patterns in the control group obtained in the step (7) from the respective mutation frequencies of the mutation patterns in the test group obtained in the step (6).

20. A method for evaluating mutations in cancer cells, comprising:
(1′) obtaining DNAs from a test group, the test group is a cancer cell population;
(2′) sequencing fragments of the DNAs to obtain one or more read sequences per fragment;
(3′) comparing each of the one or more read sequences with a reference sequence to detect sites of mismatch bases between the each read sequence and the reference sequence, wherein the reference sequence is a known sequence in the DNAs;
(4′) obtaining the sites detected in the step (3′) as sites of mutation each having a base pair substitution mutation;
(5′) as to each of the mutations thus obtained, determining a context sequence comprising a base before mutation and adjacent upstream and downstream bases of the base before mutation, the context sequence is determined on the basis of the reference sequence;
(6′) typing each of the mutations obtained in the step (4′) according to the context sequence determined in the step (5′) and the type of the base after mutation; and
(7′) determining respective mutation frequencies of the mutation types obtained in the step (6′).

21. A method for evaluating genetic information in cultured cells, comprising:
(1′) obtaining DNAs from a test group, the test group is a cultured cell population;
(2′) sequencing fragments of the DNAs to obtain one or more read sequences per fragment;
(3′) comparing each of the one or more read sequences with a reference sequence to detect sites of mismatch bases between the each read sequence and the reference sequence, wherein the reference sequence is a known sequence in the DNAs;
(4′) obtaining the sites detected in the step (3′) as sites of mutation each having a base pair substitution mutation;
(5′) as to each of the mutations thus obtained, determining a context sequence comprising a base before mutation and adjacent upstream and downstream bases of the base before mutation, the context sequence is determined on the basis of the reference sequence;
(6′) typing each of the mutations obtained in the step (4′) according to the context sequence determined in the step (5′) and the type of the base after mutation; and
(7′) determining respective mutation frequencies of the mutation types obtained in the step (6′).

22. The method according to claim 20, further comprising extracting, from the bases of the read sequences obtained in the step (2′), bases with high reading reliability of the sequencing, wherein
the step (3′) comprises comparing the extracted bases on the read sequences with the bases of the reference sequence.

23. The method according to claim 21, further comprising extracting, from the bases of the read sequences obtained in the step (2′), bases with high reading reliability of the sequencing, wherein
the step (3′) comprises comparing the extracted bases on the read sequences with the bases of the reference sequence.

24. The method according to claim 20, wherein
the steps (3′) to (6′) comprise:
dividing bases contained in the read sequences into the following bases (i) to (iv):
(i) a base located at a position where the base on the reference sequence is A,
(ii) a base located at a position where the base on the reference sequence is T,
(iii) a base located at a position where the base on the reference sequence is G, and
(iv) a base located at a position where the base on the reference sequence is C;
detecting mismatch bases with respect to the reference sequence from among the bases contained in the read sequences, and obtaining sites of the detected bases as sites of mutation each having a base pair substitution mutation;
obtaining base pairs before mutation and after mutation at the respective sites of mutation of the detected base mismatch;
classifying the base pair substitution mutations at the sites of mutation, according to the types of the base pairs before mutation and the base pairs after mutation, into 6 of base pair mutation patterns: AT→TA, AT→CG, AT→GC, GC→TA, GC→CG, and GC→AT;
determining context sequences each consisting of a base before mutation located at each of the sites of mutation, one or more adjacent upstream bases of the base before mutation, and one or more adjacent downstream bases of the base before mutation; and
typing each of the base pair substitution mutations according to the 6 of base pair mutation patterns and the context sequences.

25. The method according to claim 21, wherein
the steps (3′) to (6′) comprise:
dividing bases contained in the read sequences into the following bases (i) to (iv):
(i) a base located at a position where the base on the reference sequence is A,
(ii) a base located at a position where the base on the reference sequence is T,
(iii) a base located at a position where the base on the reference sequence is G, and
(iv) a base located at a position where the base on the reference sequence is C;
detecting mismatch bases with respect to the reference sequence from among the bases contained in the read sequences, and obtaining sites of the detected bases as sites of mutation each having a base pair substitution mutation;
obtaining base pairs before mutation and after mutation at the respective sites of mutation of the detected base mismatch;
classifying the base pair substitution mutations at the sites of mutation, according to the types of the base pairs before mutation and the base pairs after mutation, into 6 of base pair mutation patterns: AT→TA, AT→CG, AT→GC, GC→TA, GC→CG, and GC→AT;
determining context sequences each consisting of a base before mutation located at each of the sites of mutation, one or more adjacent upstream bases of the base before mutation, and one or more adjacent downstream bases of the base before mutation; and
typing each of the base pair substitution mutations according to the 6 of base pair mutation patterns and the context sequences.

26. The method according to claim 20, further comprising:
(8′) determining respective mutation frequencies of mutation types in a control group by the same procedures as in the steps (1′) to (7′); and
(9′) subtracting the respective mutation frequencies of the mutation types in the control group obtained in the step (8′) from the respective mutation frequencies of the mutation types in the test group obtained in the step (7′).

27. The method according to claim 21, further comprising:
(8′) determining respective mutation frequencies of mutation types in a control group by the same procedures as in the steps (1′) to (7′); and
(9′) subtracting the respective mutation frequencies of the mutation types in the control group obtained in the step (8′) from the respective mutation frequencies of the mutation types in the test group obtained in the step (7′).

28. A method for evaluating mutations in cancer cells, comprising:
(1″) obtaining DNAs from a test group, the test group is a cancer cell population;
(2″) sequencing fragments of the DNAs to obtain one or more read sequences per fragment;
(3″) comparing each of the one or more read sequences with a reference sequence to detect sites of base insertion or deletion in the each read sequence with respect to the reference sequence, wherein the reference sequence is a known sequence in the DNAs;
(4″) obtaining the sites detected in the step (3″) as sites of mutation each having an insertion or deletion mutation;
(5″) as to each of the mutations thus obtained, determining the base length of the insertion or deletion and/or the type of the inserted or deleted base; and
(6″) determining respective mutation frequencies for each of the sites of the insertion or deletion mutations with different base lengths of the insertion or deletion and/or different types of the inserted or deleted bases determined in the step (5″).

29. A method for evaluating genetic information in cultured cells, comprising:
(1″) obtaining DNAs from a test group, the test group is a cultured cell population;
(2″) sequencing fragments of the DNAs to obtain one or more read sequences per fragment;
(3″) comparing each of the one or more read sequences with a reference sequence to detect sites of base insertion or deletion in the each read sequence with respect to the reference sequence, wherein the reference sequence is a known sequence in the DNAs;
(4″) obtaining the sites detected in the step (3″) as sites of mutation each having an insertion or deletion mutation;
(5″) as to each of the mutations thus obtained, determining the base length of the insertion or deletion and/or the type of the inserted or deleted base; and
(6″) determining respective mutation frequencies for each of the sites of the insertion or deletion mutations with different base lengths of the insertion or deletion and/or different types of the inserted or deleted bases determined in the step (5″).

30. The method according to claim 28, further comprising extracting, from the bases of the read sequences obtained in the step (2″), bases with high reading reliability of the sequencing, wherein
the step (3″) comprises comparing the extracted bases on the read sequences with the bases of the reference sequence.

31. The method according to claim 29, further comprising extracting, from the bases of the read sequences obtained in the step (2″), bases with high reading reliability of the sequencing, wherein
the step (3″) comprises comparing the extracted bases on the read sequences with the bases of the reference sequence.

32. The method according to claim 28, further comprising:
(7″) determining respective mutation frequencies for each of sites of the insertion or deletion mutations with different base lengths of the insertion or deletion and/or different types of the inserted or deleted bases in a control group by the same procedures as in the steps (1″) to (6″); and
(8″) subtracting the respective mutation frequencies in the control group obtained in the step (7″) from the respective mutation frequencies for each of the sites of the insertion or deletion mutations with different base lengths of the insertion or deletion and/or different types of the inserted or deleted bases in the test group obtained in the step (6″).

33. The method according to claim 29, further comprising:
(7″) determining respective mutation frequencies for each of sites of the insertion or deletion mutations with different base lengths of the insertion or deletion and/or different types of the inserted or deleted bases in a control group by the same procedures as in the steps (1″) to (6″); and
(8″) subtracting the respective mutation frequencies in the control group obtained in the step (7″) from the respective mutation frequencies for each of the sites of the insertion or deletion mutations with different base lengths of the insertion or deletion and/or different types of the inserted or deleted bases in the test group obtained in the step (6″).
